(19) United States
(12) Patent Application Publication
(10) Pub. No.: US 2023/0183707 A1
(43) Pub. Date: Jun. 15, 2023

(54) COMPOSITIONS AND METHODS FOR INHIBITING MARC1 GENE EXPRESSION

(71) Applicant: ALNYLAM PHARMACEUTICALS, INC., CAMBRIDGE, MA (US)

(72) Inventors: FREDERIC TREMBLAY, BOSTON, MA (US); JAMES D. MCININCH, BURLINGTON, MA (US)

(73) Assignee: ALNYLAM PHARMACEUTICALS, INC., CAMBRIDGE, MA (US)

(21) Appl. No.: 17/999,320

(22) PCT Filed: May 21, 2021
(86) PCT No.: PCT/US2021/033663

§ 371 Date: Nov. 18, 2022

Related U.S. Application Data
(60) Provisional application No. 63/028,209, filed on May 21, 2020.

(51) Int. Cl. C12N 15/113

(52) U.S. Cl. CPC C12N 15/1137; C12Y 107/00; C12N 2310/14

(57) ABSTRACT

The disclosure relates to double-stranded ribonucleic acid (dsRNA) compositions targeting the MARC1 gene, and methods of using such dsRNA compositions to alter (e.g., inhibit) expression of MARC1.

### RELATED APPLICATIONS

[0001] This application claims priority to U.S. provisional application No. 63/028,209, filed on May 21, 2020. The entire contents of the foregoing application are hereby incorporated herein by reference.

### SEQUENCE LISTING

[0002] The instant application contains a Sequence Listing which has been submitted electronically in ASCII format and is hereby incorporated by reference in its entirety. Said ASCII copy, created on May 17, 2021, is named A2038-7244WO_SL.txt and is 698,539 bytes in size.

### FIELD OF THE DISCLOSURE

[0003] The disclosure relates to the specific inhibition of the expression of the MARC1 gene.

### BACKGROUND

[0004] Liver disease is a major cause of death and disability worldwide and chronic disease results in progressive destruction and regeneration of liver cells, leading to hepatic fibrosis and cirrhosis. Such destruction may be the result of several different causes, including but not limited to, viral infection (e.g., chronic hepatitis types B or C) or other liver infections (e.g., parasites, bacteria); exposure to chemicals (e.g., pharmaceuticals, recreational drugs, excessive alcohol, or pollutants); autoimmune processes (e.g., autoimmune hepatitis); or metabolic disorders (e.g., nonalcoholic fatty liver disease (NAFLD) or non-alcoholic steatohepatitis (NASH)). Further, the accumulation of excess triglyceride in the liver is known as hepatic steatosis (or fatty liver), and is associated with adverse metabolic consequences, including insulin resistance and dyslipidemia, and can also progress to cirrhosis and advanced scarring of the liver. Treatments for liver diseases and disorders, e.g., metabolic disorders and hepatic fibrosis, are limited, and new treatments are needed.

### SUMMARY

[0005] The present disclosure describes methods and iRNA compositions for modulating the expression of MARC1 gene. In certain embodiments, expression of a MARC1 gene is reduced or inhibited using a MARC1-specific iRNA. Such inhibition can be useful in treating disorders related to aberrant, e.g., elevated MARC1 expression and/or activity, such as hepatic fibrosis or metabolic disorders, e.g., disorders associated with elevated serum cholesterol levels such as cardiovascular diseases (e.g. coronary artery disease). In some embodiments, the disorder related to MARC1 expression is one or more of nonalcoholic fatty liver disease (NAFLD), non-alcoholic steatohepatitis (NASH)), and hepatic fibrosis.

[0006] Accordingly, described herein are compositions and methods that effect the RNA-induced silencing complex (RISC)-mediated cleavage of RNA transcripts of the MARC1 gene, such as in a cell or in a subject (e.g., in a mammal, such as a human subject). Also described are compositions and methods for treating a disorder related to expression of a MARC1 gene, such as a liver disease or disorder (e.g., a metabolic disorder, e.g., nonalcoholic fatty liver disease (NAFLD), non-alcoholic steatohepatitis (NASH), or a disorder associated with elevated serum cholesterol levels such as cardiovascular diseases (e.g. coronary artery disease); or hepatic fibrosis).

[0007] The iRNAs (e.g., dsRNAs) included in the compositions featured herein include an RNA strand (the antisense strand) having a region, e.g., a region that is 30 nucleotides or less, generally 19-24 nucleotides in length, that is substantially complementary to at least part of an mRNA transcript of a MARC1 gene (e.g., a human MARC1 gene) (also referred to herein as a “MARC1-specific iRNA” or a “MTARC1 gene”). In some embodiments, the MARC1 mRNA transcript is a human MARC1 mRNA transcript, e.g., SEQ ID NO: 1 herein.

[0008] In some embodiments, the iRNA (e.g., dsRNA) described herein comprises an antisense strand having a region that is substantially complementary to a region of a human MARC1 mRNA. In some embodiments, the human MARC1 mRNA has the sequence XM_011509900.3 (SEQ ID NO: 1), NM_022746.4 (SEQ ID NO: 4000), XM_011509903.3 (SEQ ID NO: 4003), XM_011509904.3 (SEQ ID NO: 4005), XM_017002096.2 (SEQ ID NO: 4007), or XM_017002097.2 (SEQ ID NO: 4009). The sequences of XM_011509900.3, NM_022746.4, XM_011509903.3, XM_011509904.3, XM_017002096.2, and XM_017002097.2 are also herein incorporated by reference in their entirety. In some embodiments, the human MARC1 mRNA has the sequence of XM_011509900 (SEQ ID NO: 1). In some embodiments, the human MARC1 mRNA has the sequence of NM_022746.4 (SEQ ID NO: 4000). The reverse complement of SEQ ID NO: 1 is provided as SEQ ID NO: 2 herein. The reverse complement of SEQ ID NO: 4000 is provided as SEQ ID NO: 4001 herein. The reverse complement of SEQ ID NO: 4003 is provided as SEQ ID NO: 4004 herein. The reverse complement of SEQ ID NO: 4005 is provided as SEQ ID NO: 4006 herein. The reverse complement of SEQ ID NO: 4007 is provided as SEQ ID NO: 4008 herein. The reverse complement of SEQ ID NO: 4009 is provided as SEQ ID NO: 4010 herein.

[0009] In some embodiments, the iRNA (e.g., dsRNA) described herein comprises an antisense strand having a region that is substantially complementary to a region of a murine MARC1 mRNA. In some embodiments, the murine MARC1 mRNA has the sequence NM_001290273.1 (SEQ ID NO: 4011). The reverse complement of SEQ ID NO: 4011 is provided herein as SEQ ID NO: 4012. In some embodiments, the murine MARC1 has the sequence XM_006497192, or NM_001081361. The sequences of NM_001290273.1, XM_006497192, and NM_001081361 are incorporated by reference in their entirety.

[0010] In some embodiments, the iRNA (e.g., dsRNA) described herein comprises an antisense strand having a region that is substantially complementary to a region of a primate, rat, or dog MARC1 mRNA. In some embodiments, the primate MARC1 mRNA, e.g., a cynomolgus monkey MARC1, has the sequence XM_005540898, XM_005540899, XM_005540901, XR_001490726, XR_273286, XR_273285, XR_001490723, or XR_001490722. The sequences of XM_005540898, XM_005540899, XM_005540901, XR_001490726, XR_273286, XR_273285, XR_001490723, and XR_001490722 are incorporated by reference in their entirety. In some embodiments, the rat MARC1 has the sequence XM_017598938, or NM_001100811. The sequences of XM_017598938 and NM_001100811 are incorporated by reference in their entirety. In some embodiments, the dog MARC1 has a sequence of XM_005640829. The sequence XM_005640829 is incorporated by reference in its entirety.

[0011] In some aspects, the present disclosure provides a double stranded ribonucleic acid (dsRNA) agent for inhibiting expression of a Mitochondrial Amidoxime Reducing Component 1 (a MARC1 gene), wherein the dsRNA agent comprises a sense strand and an antisense strand forming a double stranded region, wherein the sense strand comprises a nucleotide sequence comprising at least 15 contiguous nucleotides, with 0, 1, 2, or 3 mismatches, of a portion of a coding strand of human MARC1 gene and the antisense strand comprises a nucleotide sequence comprising at least 15 contiguous nucleotides, with 0, 1, 2, or 3 mismatches, of the corresponding portion of a non-coding strand of human MARC1 gene such that the sense strand is complementary to the at least 15 contiguous nucleotides in the antisense strand.

[0012] In some aspects, the present disclosure provides a double stranded ribonucleic acid (dsRNA) agent for inhibiting expression of a MARC1 gene, wherein the dsRNA agent comprises a sense strand and an antisense strand forming a double stranded region, wherein the antisense strand comprises a nucleotide sequence comprising at least 15 contiguous nucleotides, with 0, 1, 2, or 3 mismatches, of a portion of nucleotide sequence of any one of SEQ ID NO: 2 such that the sense strand is complementary to the at least 15 contiguous nucleotides in the antisense strand.

[0013] In some aspects, the present disclosure provides a human cell comprising a reduced level of MARC1 mRNA or a level of MARC1 protein as compared to an otherwise similar untreated cell, wherein optionally the cell is not genetically engineered (e.g., wherein the cell comprises one or more naturally arising mutations, e.g. a MARC1 gene), wherein optionally the level is reduced by at least 10%, 15%, 20%, 25%, 30%, 35%, 40%, 45%, 50%, 55%, 60%, 65%, 70%, 75%, 80%, 85%, 90%, or 95%. In some embodiments, the human cell is a hepatocyte from a subject. In some embodiments, the otherwise similar untreated cell is an untreated hepatocyte, e.g., an untreated hepatocyte from the same subject.

[0014] The present disclosure also provides, in some aspects, a cell containing the dsRNA agent described herein.

[0015] In some aspects, the present disclosure also provides a pharmaceutical composition for inhibiting expression of a gene encoding a MARC1, comprising a dsRNA agent described herein.

[0016] The present disclosure also provides, in some aspects, a method of inhibiting expression of a MARC1 gene in a cell, the method comprising:

[0017] (a) contacting the cell with the dsRNA agent described herein, or a pharmaceutical composition described herein; and

[0018] (b) maintaining the cell produced in step (a) for a time sufficient to obtain degradation of the mRNA transcript of the MARC1 gene, thereby inhibiting expression of the MARC1 gene in the cell.

[0019] The present disclosure also provides, in some aspects, a method of inhibiting expression of a MARC1 gene in a cell, the method comprising:

[0020] (a) contacting the cell with the dsRNA agent described herein, or a pharmaceutical composition described herein; and

[0021] (b) maintaining the cell produced in step (a) for a time sufficient to reduce levels of MARC1 mRNA, MARC1 protein, or both of MARC1 mRNA and protein, thereby inhibiting expression of the MARC1 gene in the cell.

[0022] The present disclosure provides, in some aspects, a method of reducing serum cholesterol levels in a subject, the method comprising administering to the subject a therapeutically effective amount of the dsRNA agent described herein or a pharmaceutical composition described herein, thereby treating the disorder.

[0023] The present disclosure also provides, in some aspects, a method of treating a subject diagnosed with a MARC1-associated disorder comprising administering to the subject a therapeutically effective amount of the dsRNA agent described herein or a pharmaceutical composition described herein, thereby treating the disorder.

[0024] In any of the aspects herein, e.g., the compositions and methods above, any of the embodiments herein (e.g., below) may apply.

[0025] In some embodiments, the coding strand of human MARC1 gene has the sequence of SEQ ID NO: 1. In some embodiments, the non-coding strand of human MARC1 gene has the sequence of SEQ ID NO: 2. In some embodiments, the coding strand of the human MARC1 gene has the sequence of SEQ ID NO: 4000. In some embodiments the non-coding strand of the human MARC1 gene has the sequence of SEQ ID NO: 4001

[0026] In some embodiments, the sense strand comprises a nucleotide sequence comprising at least 15 contiguous nucleotides, with 0, or 1, 2, or 3 mismatches, of the corresponding portion of the nucleotide sequence of SEQ ID NO: 1. In some embodiments, the sense strand comprises a nucleotide sequence comprising at least 15 contiguous nucleotides, with 0, or 1, 2, or 3 mismatches, of the corresponding portion of the nucleotide sequence of SEQ ID NO: 4000.

[0027] In some embodiments, the dsRNA agent comprises a sense strand and an antisense strand, wherein the antisense strand comprises a nucleotide sequence comprising at least 17 contiguous nucleotides, with 0, 1, 2, or 3 mismatches, of a portion of nucleotide sequence of SEQ ID NO: 2 such that the sense strand is complementary to the at least 17 contiguous nucleotides in the antisense strand. In some embodiments, the sense strand comprises a nucleotide sequence comprising at least 17 contiguous nucleotides, with 0, or 1, 2, or 3 mismatches, of the corresponding portion of the nucleotide sequence of SEQ ID NO: 1.

[0028] In some embodiments, the dsRNA agent comprises a sense strand and an antisense strand, wherein the antisense strand comprises a nucleotide sequence comprising at least 17 contiguous nucleotides, with 0, 1, 2, or 3 mismatches, of a portion of nucleotide sequence of SEQ ID NO: 4001 such that the sense strand is complementary to the at least 17 contiguous nucleotides in the antisense strand. In some embodiments, the sense strand comprises a nucleotide sequence comprising at least 17 contiguous nucleotides, with 0, or 1, 2, or 3 mismatches, of the corresponding portion of the nucleotide sequence of SEQ ID NO: 4000.

[0029] In some embodiments, the dsRNA agent comprises a sense strand and an antisense strand, wherein the antisense strand comprises a nucleotide sequence comprising at least 19 contiguous nucleotides, with 0, 1, 2, or 3 mismatches, of a portion of nucleotide sequence of SEQ ID NO: 2 such that the sense strand is complementary to the at least 19 contiguous nucleotides in the antisense strand. In some embodiments, the sense strand comprises a nucleotide sequence comprising at least 19 contiguous nucleotides, with 0, 1, 2, or 3 mismatches, of the corresponding portion of the nucleotide sequence of SEQ ID NO: 1.

[0030] In some embodiments, the dsRNA agent comprises a sense strand and an antisense strand, wherein the antisense strand comprises a nucleotide sequence comprising at least 19 contiguous nucleotides, with 0, 1, 2, or 3 mismatches, of a portion of nucleotide sequence of SEQ ID NO: 4001 such that the sense strand is complementary to the at least 19 contiguous nucleotides in the antisense strand. In some embodiments, the sense strand comprises a nucleotide sequence comprising at least 19 contiguous nucleotides, with 0, 1, 2, or 3 mismatches, of the corresponding portion of the nucleotide sequence of SEQ ID NO: 4000.

[0031] In some embodiments, the dsRNA agent comprises a sense strand and an antisense strand, wherein the antisense strand comprises a nucleotide sequence comprising at least 21 contiguous nucleotides, with 0, 1, 2, or 3 mismatches, of a portion of nucleotide sequence of SEQ ID NO: 2 such that the sense strand is complementary to the at least 21 contiguous nucleotides in the antisense strand. In some embodiments, the sense strand comprises a nucleotide sequence comprising at least 21 contiguous nucleotides, with 0, or 1, 2, or 3 mismatches, of the corresponding portion of the nucleotide sequence of SEQ ID NO: 1.

[0032] In some embodiments, the dsRNA agent comprises a sense strand and an antisense strand, wherein the antisense strand comprises a nucleotide sequence comprising at least 21 contiguous nucleotides, with 0, 1, 2, or 3 mismatches, of a portion of nucleotide sequence of SEQ ID NO: 4001 such that the sense strand is complementary to the at least 21 contiguous nucleotides in the antisense strand. In some embodiments, the sense strand comprises a nucleotide sequence comprising at least 21 contiguous nucleotides, with 0, or 1, 2, or 3 mismatches, of the corresponding portion of the nucleotide sequence of SEQ ID NO: 4000.

[0033] In some embodiments, the portion of the sense strand is a portion within a sense strand in any one of Tables 2A, 2B, 3A, 3B, 4A, or 4B.

[0034] In some embodiments, the antisense strand comprises a nucleotide sequence comprising at least 15 contiguous nucleotides, with 0, 1, 2, or 3 mismatches, from one of the antisense sequences listed in Table 2A, 2B, 3A, 3B, 4A, or 4B. In some embodiments, the sense strand comprises a nucleotide sequence comprising at least 15 contiguous nucleotides, with 0, 1, 2, or 3 mismatches, from a sense sequence listed in Table 2A, 2B, 3A, 3B, 4A, or 4B that corresponds to the antisense sequence.

[0035] In some embodiments, the antisense strand comprises a nucleotide sequence comprising at least 17 contiguous nucleotides, with 0, 1, 2, or 3 mismatches, from one of the antisense sequences listed in Table 2A, 2B, 3A, 3B, 4A, or 4B. In some embodiments, the sense strand comprises a nucleotide sequence comprising at least 17 contiguous nucleotides, with 0, 1, 2, or 3 mismatches, from a sense sequence listed in Table 2A, 2B, 3A, 3B, 4A, or 4B that corresponds to the antisense sequence.

[0036] In some embodiments, the antisense strand comprises a nucleotide sequence comprising at least 19 contiguous nucleotides, with 0, 1, 2, or 3 mismatches, from one of the antisense sequences listed in Table 2A, 2B, 3A, 3B, 4A, or 4B. In some embodiments, the sense strand comprises a nucleotide sequence comprising at least 19 contiguous nucleotides, with 0, 1, 2, or 3 mismatches, from a sense sequence listed in Table 2A, 2B, 3A, 3B, 4A, or 4B that corresponds to the antisense sequence.

[0037] In some embodiments, the antisense strand comprises a nucleotide sequence comprising at least 21 contiguous nucleotides, with 0, 1, 2, or 3 mismatches, from one of the antisense sequences listed in Table 2A, 2B, 3A, 3B, 4A, or 4B. In some embodiments, the sense strand comprises a nucleotide sequence comprising at least 21 contiguous nucleotides, with 0, 1, 2, or 3 mismatches, from a sense sequence listed in Table 2A, 2B, 3A, 3B, 4A, or 4B that corresponds to the antisense sequence.

[0038] In some embodiments, the sense strand of the dsRNA agent is at least 23 nucleotides in length, e.g., 23-30 nucleotides in length.

[0039] In some embodiments, the dsRNA agent comprises at least one modified nucleotide. In some embodiments, no more than five of the sense strand nucleotides and not more than five of the nucleotides of the antisense strand are unmodified nucleotides. In some embodiments, all of the nucleotides of the sense strand and all of the nucleotides of the antisense strand comprise a modification.

[0040] In some embodiments, at least one of the modified nucleotides is selected from the group consisting of a deoxy-nucleotide, a 3′-terminal deoxy-thymine (dT) nucleotide, a 2′-O-methyl modified nucleotide, a 2′-fluoro modified nucleotide, a 2′-deoxy-modified nucleotide, a locked nucleotide, an unlocked nucleotide, a conformationally restricted nucleotide, a constrained ethyl nucleotide, an abasic nucleotide, a 2′-amino-modified nucleotide, a 2′-O-allyl-modified nucleotide, 2′-C-alkyl-modified nucleotide, a 2′-methoxyethyl modified nucleotide, a 2′-O-alkyl-modified nucleotide, a morpholino nucleotide, a phosphoramidate, a non-natural base comprising nucleotide, a tetrahydropyran modified nucleotide, a 1,5-anhydrohexitol modified nucleotide, a cyclohexenyl modified nucleotide, a nucleotide comprising a phosphorothioate group, a nucleotide comprising a methylphosphonate group, a nucleotide comprising a 5′-phosphate, a nucleotide comprising a 5′-phosphate mimic, a glycol modified nucleotide, and a 2-O—(N-methylacetamide) modified nucleotide; and combinations thereof. In some embodiments, no more than five of the sense strand nucleotides and not more than five of the nucleotides of the antisense strand include modifications other than 2′-O-methyl modified nucleotide, a 2′-fluoro modified nucleotide, a 2′-deoxy-modified nucleotide, unlocked nucleic acids (UNA) or glycerol nucleic acid (GNA).

[0041] In some embodiments, the dsRNA comprises a non-nucleotide spacer (wherein optionally the non-nucleotide spacer comprises a C3-C6 alkyl) between two of the contiguous nucleotides of the sense strand or between two of the contiguous nucleotides of the antisense strand.

[0042] In some embodiments, the dsRNA agent further comprises a ligand. In some embodiments, the ligand is conjugated to the sense strand. In some embodiments, the ligand is conjugated to the 3′ end or the 5′ end of the sense strand. In some embodiments, the dsRNA agent is conjugated to the 3′ end of the sense strand. In some embodiments, the ligand comprises N-acetylgalactosamine (GalNAc). In some embodiments, the ligand is an N-acetylgalactosamine (GalNAc) derivative. In some embodiments, the ligand is one or more GalNAc derivatives attached through a monovalent linker, or a bivalent, trivalent, or tetravalent branched linker. In some embodiments, the ligand is

[chemical structure]

[0043] In some embodiments, the dsRNA agent is conjugated to the ligand as shown in the following schematic

[chemical structure]

wherein X is O or S. In some embodiments, the X is O.

[0044] In some embodiments, the dsRNA agent further comprises a terminal, chiral modification occurring at the first internucleotide linkage at the 3′ end of the antisense strand, having the linkage phosphorus atom in Sp configuration, a terminal, chiral modification occurring at the first internucleotide linkage at the 5′ end of the antisense strand, having the linkage phosphorus atom in Rp configuration, and a terminal, chiral modification occurring at the first internucleotide linkage at the 5′ end of the sense strand, having the linkage phosphorus atom in either Rp configuration or Sp configuration.

[0045] In some embodiments, the dsRNA agent further comprises a terminal, chiral modification occurring at the first and second internucleotide linkages at the 3′ end of the antisense strand, having the linkage phosphorus atom in Sp configuration, a terminal, chiral modification occurring at the first internucleotide linkage at the 5′ end of the antisense strand, having the linkage phosphorus atom in Rp configuration, and a terminal, chiral modification occurring at the first internucleotide linkage at the 5′ end of the sense strand, having the linkage phosphorus atom in either Rp or Sp configuration.

[0046] In some embodiments, the dsRNA agent further comprises a terminal, chiral modification occurring at the first, second and third internucleotide linkages at the 3′ end of the antisense strand, having the linkage phosphorus atom in Sp configuration, a terminal, chiral modification occurring at the first internucleotide linkage at the 5′ end of the antisense strand, having the linkage phosphorus atom in Rp configuration, and a terminal, chiral modification occurring at the first internucleotide linkage at the 5′ end of the sense strand, having the linkage phosphorus atom in either Rp or Sp configuration.

[0047] In some embodiments, the dsRNA agent further comprises a terminal, chiral modification occurring at the first, and second internucleotide linkages at the 3′ end of the antisense strand, having the linkage phosphorus atom in Sp configuration, a terminal, chiral modification occurring at the third internucleotide linkages at the 3′ end of the antisense strand, having the linkage phosphorus atom in Rp configuration, a terminal, chiral modification occurring at the first internucleotide linkage at the 5′ end of the antisense strand, having the linkage phosphorus atom in Rp configuration, and a terminal, chiral modification occurring at the first internucleotide linkage at the 5′ end of the sense strand, having the linkage phosphorus atom in either Rp or Sp configuration.

[0048] In some embodiments, the dsRNA agent further comprises a terminal, chiral modification occurring at the first, and second internucleotide linkages at the 3′ end of the antisense strand, having the linkage phosphorus atom in Sp configuration, a terminal, chiral modification occurring at the first, and second internucleotide linkages at the 5′ end of the antisense strand, having the linkage phosphorus atom in Rp configuration, and a terminal, chiral modification occurring at the first internucleotide linkage at the 5′ end of the sense strand, having the linkage phosphorus atom in either Rp or Sp configuration.

[0049] In some embodiments, each strand is no more than 30 nucleotides in length. In some embodiments, at least one strand comprises a 3′ overhang of at least 1 nucleotide. In some embodiments, at least one strand comprises a 3′ overhang of at least 2 nucleotides. In some embodiments, at least one strand comprises a 3′ overhang of 2 nucleotides.

[0050] In some embodiments, the double stranded region is 15-30 nucleotide pairs in length. In some embodiments, the double stranded region is 17-23 nucleotide pairs in length. In some embodiments, the double stranded region is 17-25 nucleotide pairs in length. In some embodiments, the double stranded region is 23-27 nucleotide pairs in length. In some embodiments, the double stranded region is 19-21 nucleotide pairs in length. In some embodiments, the double stranded region is 21-23 nucleotide pairs in length. In some embodiments, each strand has 19-30 nucleotides. In some embodiments, each strand has 19-23 nucleotides. In some embodiments, each strand has 21-23 nucleotides.

[0051] In some embodiments, the agent comprises at least one phosphorothioate or methylphosphonate internucleotide linkage. In some embodiments, the phosphorothioate or methylphosphonate internucleotide linkage is at the 3′-terminus of one strand. In some embodiments, the strand is the antisense strand. In some embodiments, the strand is the sense strand.

[0052] In some embodiments, the phosphorothioate or methylphosphonate internucleotide linkage is at the 5′-terminus of one strand. In some embodiments, the strand is the antisense strand. In some embodiments, the strand is the sense strand.

[0053] In some embodiments, each of the 5′- and 3′-terminus of one strand comprises a phosphorothioate or methylphosphonate internucleotide linkage. In some embodiments, the strand is the antisense strand.

[0054] In some embodiments, the base pair at the 1 position of the 5′-end of the antisense strand of the duplex is an AU base pair.

[0055] In some embodiments, the sense strand has a total of 21 nucleotides and the antisense strand has a total of 23 nucleotides.

[0056] In some embodiments, a cell described herein, e.g., a human cell, was produced by a process comprising contacting a human cell with the dsRNA agent described herein.

[0057] In some embodiments, a pharmaceutical composition described herein comprises the dsRNA agent and a lipid formulation.

[0058] In some embodiments (e.g., embodiments of the methods described herein), the cell is within a subject. In some embodiments, the subject is a human. In some embodiments, the expression of MARC1 gene is inhibited by at least 50%. In some embodiments, the level of MARC1 mRNA is inhibited by at least 50%. In some embodiments, the level of MARC1 protein is inhibited by at least 50%. In some embodiments, inhibiting expression of a MARC1 gene decreases a MARC1 protein level in a biological sample (e.g., a serum sample or a liver biopsy sample) from the subject by at least 30%, 40%, 50%, 60%, 70%, 80%, 90%, or 95%. In some embodiments, inhibiting expression of a MARC1 gene decreases a MARC1 mRNA level in a biological sample (e.g., a serum sample or a liver biopsy sample) from the subject by at least 30%, 40%, 50%, 60%, 70%, 80%, 90%, or 95%.

[0059] In some embodiments (e.g., the embodiments of the methods described herein), the expression of a MARC1 gene is increased by at least 20%. In some embodiments, the level of MARC1 mRNA is inhibited by at least 20%. In some embodiments, the level of MARC1 protein is increased by at least 20%. In some embodiments, the expression of MARC1 gene is increased by at least 50%. In some embodiments, the level of MARC1 mRNA is inhibited by at least 50%. In some embodiments, the level of MARC1 protein is increased by at least 50%. In some embodiments, increasing expression of MARC1 gene increases a MARC1 protein level in a biological sample (e.g., a serum sample or a liver biopsy sample) from the subject by at least 10%, 20%, 30%, 40%, 50%, 60%, 70%, 80%, 90%, or 95%. In some embodiments, increasing expression of a MARC1 gene increases a MARC1 mRNA level in a biological sample (e.g., a serum sample or a liver biopsy sample) from the subject by at least 10%, 20%, 30%, 40%, 50%, 60%, 70%, 80%, 90%, or 95%.

[0060] In some embodiments, the subject has or has been diagnosed with having a MARC1-associated disorder. In some embodiments (e.g., embodiments of the methods described herein), the subject meets at least one diagnostic criterion for a MARC1-associated disorder, e.g., hepatic fibrosis or a metabolic disorder, e.g., nonalcoholic fatty liver disease (NAFLD) or non-alcoholic steatohepatitis (NASH). In some embodiments, the subject has or has been diagnosed with having hepatic fibrosis or a metabolic disorder, e.g., nonalcoholic fatty liver disease (NAFLD) or non-alcoholic steatohepatitis (NASH). In some embodiments, the subject has or has been diagnosed with having a metabolic disorder associated with elevated serum cholesterol levels such as cardiovascular diseases (e.g. coronary artery disease).

[0061] In some embodiments, the MARC1-associated disorder is a liver disease or disorder, e.g., a liver disease or disorder described herein. In some the MARC1-associated disorder is hepatic fibrosis or a metabolic disorder, e.g., a nonalcoholic fatty liver disease (NAFLD) or a nonalcoholic steatohepatitis (NASH). In some embodiments, the MARC-1 associated disorder is a metabolic disorder associated with elevated serum cholesterol levels, e.g., a cardiovascular disease described herein. In some embodiments, the metabolic disorder associated with elevated serum cholesterol levels, is a coronary artery disease. In some embodiments, the MARC1-associated disorder is hepatic fibrosis. In some embodiments, the MARC1-associate disorder is a nonalcoholic fatty liver disease (NAFLD). In some embodiments, the MARC1-associated disorder is non-alcoholic steatohepatitis (NASH). In some embodiments, the nonalcoholic fatty liver disease (NAFLD) is nonalcoholic steatohepatitis (NASH). In some embodiments, the hepatic fibrosis is caused by nonalcoholic fatty liver disease (NAFLD). In some embodiments, the subject has nonalcoholic fatty liver disease (NAFLD) and hepatic fibrosis. In some embodiments, the hepatic fibrosis is caused by nonalcoholic steatohepatitis (NASH). In some embodiments, the subject has nonalcoholic steatohepatitis (NASH) and hepatic fibrosis.

[0062] In some embodiments, treating comprises amelioration of at least one sign or symptom of the disorder. In some embodiments, the at least one sign or symptom of liver disorder, e.g., hepatic fibrosis or a metabolic disorder, comprises one or more of altered levels (e.g., increased levels) of liver enzymes alanine aminotransferase (ALT) and aspartate aminotransferase (AST), high cholesterol (e.g., high levels of total cholesterol or high levels of LDL cholesterol), high levels of triglycerides in the blood, liver inflammation, liver enlargement, spleen enlargement, cirrhosis, abdominal pain, altered bilirubin levels, altered serum albumin levels, jaundice, e.g., by a blood or a serum sample, a biopsy (e.g., a liver biopsy), and/or imaging (e.g., CT, MRI, transient elastography, or ultrasound). In some embodiments, the at least one sign or symptom includes a presence or a level of MARC1 (e.g., MARC1 gene, MARC1 mRNA, or MARC1 protein). In some embodiments, a level of the MARC1 that is higher than a reference level is indicative that the subject has hepatic fibrosis or a metabolic disorder. In some embodiments, treating comprises a reduction in serum cholesterol levels in a subject. In some embodiments, treating comprises prevention of progression of the disorder. In some embodiments, treating comprises preventing progression of a MARC1 associated disorder in a subject, e.g., preventing progression from simple fatty liver (e.g., a steatosis or NAFLD) to NASH, from NASH to liver fibrosis, or from liver fibrosis to cirrhosis. In some embodiments, the subject is human.

[0063] In some embodiments, the dsRNA agent is administered at a dose of about 0.01 mg/kg to about 50 mg/kg. In some embodiments, the dsRNA agent is administered to the subject subcutaneously. In some embodiments, the dsRNA agent is administered to the subject intravenously.

[0064] In some embodiments, a method described herein further comprises measuring a level of MARC1 (e.g., MARC1 gene, MARC1 mRNA, or MARC1 protein) in the subject. In some embodiments, measuring the level of MARC1 in the subject comprises measuring the level of MARC1 protein in a biological sample from the subject (e.g., a blood or serum sample). In some embodiments, a method described herein further comprises performing a blood test, an imaging test, or a liver biopsy.

[0065] In some embodiments, a method described herein further measuring level of MARC1 (e.g., MARC1 gene, MARC1 mRNA, or MARC1 protein) in the subject is performed prior to treatment with the dsRNA agent or the pharmaceutical composition. In some embodiments, upon determination that a subject has a level of MARC1 that is greater than a reference level, the dsRNA agent or the pharmaceutical composition is administered to the subject. In some embodiments, measuring level of MARC1 in the subject is performed after treatment with the dsRNA agent or the pharmaceutical composition.

[0066] In some embodiments, a method described herein further comprises treating the subject with a therapy suitable for treatment or prevention of a MARC1-associated disorder, e.g., wherein the therapy comprises altered diet, weight loss, reduction or discontinuance of the consumption of alcohol, increased exercise, surgical liver resection, vitamin E, pioglitazone, anti-viral agents (e.g., lamivudine, interferon-alpha, ribavirin, adefovir, or corticosteroids). In some embodiments, a method described herein further comprises administering to the subject an additional agent suitable for treatment or prevention of a MARC1-associated disorder. In some embodiments, the additional agent comprises anti-viral agents, corticosteroids, vitamin E or pioglitazone.

[0067] All publications, patent applications, patents, and other references mentioned herein are incorporated by reference in their entirety.

[0068] The details of various embodiments of the disclosure are set forth in the description below. Other features, objects, and advantages of the disclosure will be apparent from the description and the drawings, and from the claims.

### BRIEF DESCRIPTION OF THE DRAWINGS

[0069] FIG. 1 depicts the sequences and chemistry of the exemplary MARC1 siRNAs: AD-646025 (SEQ ID NOs: 1865 and 1910), AD-646147 (SEQ ID NOs: 1892 and 1937), AD-646158 (SEQ ID NOs: 1886 and 1931), AD-646151 (SEQ ID NOs: 1893 and 1938), AD-646154 (SEQ ID NOs: 1869 and 1914), AS-646360 (SEQ ID NOs: 1906 and 1951), and AD-646165 (SEQ ID NOs: 1904 and 1949), which were designed to target regions of the MARC1 mRNA in mice and also correspond to duplex sequences in Table 4A. For each siRNA, “F” which is shown in green is the “2′fluoro” modification, OMe shown in black is a methoxy group, and PS refers to the phosphonothioate linkage.

[0070] FIG. 2 provides a schematic depicting an overview of the experimental design of Example 3 investigating the efficacy of exemplary murine MARC1 targeting siRNAs in the knockdown of MARC1 mRNA levels in the livers of mice.

[0071] FIG. 3 provides a schematic depicting an overview of the experimental design of Example 4 investigating the effects of exemplary murine MARC1 targeting siRNAs, AD-646025 and AD-646147, in an in vivo murine model of nonalcoholic steatohepatitis (NASH).

[0072] FIGS. 4A-4B provides a series of graphs depicting fold change in MARC1 mRNA levels in mice fed a HF/HFr diet treated with exemplary murine MARC1 targeting siRNAs (AD-646147 or AD-646025) or a PBS control or mice fed a regular chow diet (LFD) treated with a PBS control. FIG. 4A depicts MARC1 mRNA knockdown in mice treated with the duplex AD-646147. FIG. 4B depicts mRNA MARC1 mRNA knockdown in mice treated with AD-646025.

[0073] FIGS. 5A-5C provides a series of graphs depicting the body and liver weights of mice at week 21 fed a HF/HFr diet treated with exemplary murine MARC1 targeting siRNAs (AD-646147 or AD-646025) or a PBS control, or mice fed a regular chow diet (LFD) treated with a PBS control. FIG. 5A depicts the body weight (grams) for each treatment group. FIG. 5B depicts the liver weight (grams) for each treatment group. FIG. 5C depicts the percentage of liver weight to body weight for each treatment group.

[0074] FIGS. 6A-6C provides a series of graphs depicting the serum levels of various liver enzymes at week 21 in mice fed a HF/HFr diet treated with exemplary murine MARC1 targeting siRNAs (AD-646147 or AD-646025) or a PBS control, or mice fed a regular chow diet (LFD) treated with a PBS control. FIG. 6A depicts serum alanine aminotransferase (ALT) levels.

[0075] FIG. 6B depicts serum aspartate aminotransferase (AST) levels. FIG. 6C depicts serum glutamate dehydrogenase (GLDH) levels.

[0076] FIGS. 7A-7B provides a series of graphs depicting the serum levels of Serum alkaline phosphatase levels (ALP) and cholesterol at week 21 in mice fed a HF/HFr diet treated with exemplary murine MARC1 targeting siRNAs (AD-646147 or AD-646025) or a PBS control, or mice fed a regular chow diet (LFD) treated with a PBS control. FIG. 7A depicts serum ALP levels. FIG. 7B depicts serum cholesterol levels.

[0077] FIGS. 8A-8B provides a series of graphs depicting the serum levels of various fatty acids at week 21 in mice fed a HF/HFr diet treated with exemplary murine MARC1 targeting siRNAs (AD-646147 or AD-646025) or a PBS control, or mice fed a regular chow diet (LFD) treated with a PBS control. FIG. 8A depicts serum triglyceride (TG) levels. FIG. 8B depicts free fatty acid (FFA) levels.

### DETAILED DESCRIPTION

[0078] iRNA directs the sequence-specific degradation of mRNA through a process known as RNA interference (RNAi). Described herein are iRNAs and methods of using them for modulating (e.g., inhibiting) the expression of a MARC1 gene. Also provided are compositions and methods for treatment of disorders related to MARC1 expression, such as hepatic fibrosis or a metabolic disorders (e.g., nonalcoholic fatty liver disease (NAFLD), non-alcoholic liver steatohepatitis (NASH), or disorders associated with elevated serum cholesterol levels such as cardiovascular diseases (e.g. coronary artery disease)).

[0079] The following description discloses how to make and use compositions containing iRNAs to modulate (e.g., inhibit) the expression of a MARC1 gene, as well as compositions and methods for treating disorders related to expression of a MARC1 gene.

[0080] Human MARC1 is approximately a 37 kDa protein and is a mitochondrial amidoxime-reducing component, a molybdenum-containing enzyme. MARC1 is localized to the mitochondria, where an N-terminal transmembrane helix anchors it to the outer mitochondrial membrane and the enzymatic domain is located in the cytosol. MARC1 catalyzes the reduction of N-oxygenated molecules, acting as a counterpart of cytochrome p450 and flavin-containing monooxygenases in metabolic cycles. MARC1 also functions as a component of a prodrug-converting system, reducing a multitude of N-hydroxylated prodrugs particularly amidoximes, leading to increased drug bioavailability. MARC1 deficiencies can lead to altered lipid metabolism in the liver. Without wishing to be bound by theory it is believed that in some embodiments, decreasing MARC1 expression results in decreased lipid and fat accumulation in the liver and reduced blood levels of alanine aminotransferase (ALT), alkaline phosphatase (ALP), LDL cholesterol, and total cholesterol, leading to decreased cirrhosis in the liver. Without wishing to be bound by theory, it is believed in some embodiments, decreasing MARC1 expression decreases incidences of liver disease.

[0081] The following description discloses how to make and use compositions containing iRNAs to modulate (e.g., inhibit) the expression of MARC1, as well as compositions and methods for treating disorders related to expression of MARC1.

[0082] In some aspects, pharmaceutical compositions containing a MARC1 iRNA and a pharmaceutically acceptable carrier, methods of using the compositions to inhibit expression of a MARC1 gene, and methods of using the pharmaceutical compositions to treat disorders related to expression of a MARC1 gene (e.g., hepatic fibrosis or a metabolic disorder (e.g., nonalcoholic fatty liver disease (NAFLD) or non-alcoholic liver steatohepatitis (NASH)) are featured herein.

### I. Definitions

[0083] For convenience, the meaning of certain terms and phrases used in the specification, examples, and appended claims, are provided below. If there is an apparent discrepancy between the usage of a term in other parts of this specification and its definition provided in this section, the definition in this section shall prevail.

[0084] The term “about” when referring to a number or a numerical range means that the number or numerical range referred to is an approximation within experimental variability (or within statistical experimental error), and thus the number or numerical range may vary from, for example, between 1% and 15% of the stated number or numerical range.

[0085] The term “at least” prior to a number or series of numbers is understood to include the number adjacent to the term “at least”, and all subsequent numbers or integers that could logically be included, as clear from context. For example, the number of nucleotides in a nucleic acid molecule must be an integer. For example, “at least 17 nucleotides of a 20 nucleotide nucleic acid molecule” means that 17, 18, 19, or 20 nucleotides have the indicated property. When at least is present before a series of numbers or a range, it is understood that “at least” can modify each of the numbers in the series or range.

[0086] As used herein, “no more than” or “less than” is understood as the value adjacent to the phrase and logical lower values or integers, as logical from context, to zero. For example, a duplex with mismatches to a target site of “no more than 2 nucleotides” has a 2, 1, or 0 mismatches. When “no more than” is present before a series of numbers or a range, it is understood that “no more than” can modify each of the numbers in the series or range.

[0087] As used herein, “up to” as in “up to 10” is understood as up to and including 10, i.e., 0, 1, 2, 3, 4, 5, 6, 7, 8, 9, or 10.

[0088] Ranges provided herein are understood to include all individual integer values and all subranges within the ranges.

[0089] The terms “activate,” “enhance,” “up-regulate the expression of,” “increase the expression of,” and the like, in so far as they refer to a MARC1 gene, herein refer to the at least partial activation of the expression of a MARC1 gene, as manifested by an increase in the amount of MARC1 mRNA, which may be isolated from or detected in a first cell or group of cells in which a MARC1 gene is transcribed and which has or have been treated such that the expression of a MARC1 gene is increased, as compared to a second cell or group of cells substantially identical to the first cell or group of cells but which has or have not been so treated (control cells).

[0090] In some embodiments, expression of a MARC1 gene is activated by at least about 10%, 15%, 20%, 25%, 30%, 35%, 40%, 45%, or 50% by administration of an iRNA as described herein. In some embodiments, a MARC1 gene is activated by at least about 60%, 70%, or 80% by administration of an iRNA featured in the disclosure. In some embodiments, expression of a MARC1 gene is activated by at least about 85%, 90%, or 95% or more by administration of an iRNA as described herein. In some embodiments, the MARC1 gene expression is increased by at least 1-fold, at least 2-fold, at least 5-fold, at least 10-fold, at least 50-fold, at least 100-fold, at least 500-fold, at least 1000-fold or more in cells treated with an iRNA as described herein compared to the expression in an untreated cell. Activation of expression by small dsRNAs is described, for example, in Li et al., 2006 Proc. Natl. Acad. Sci. U.S.A. 103:17337-42, and in US2007/0111963 and US2005/226848, each of which is incorporated herein by reference.

[0091] The terms “silence,” “inhibit expression of,” “down-regulate expression of,” “suppress expression of,” and the like, in so far as they refer to a MARC1 gene, herein refer to the at least partial suppression of the expression of a MARC1 gene, as assessed, e.g., based on MARC1 mRNA expression, MARC1 protein expression, or another parameter functionally linked to MARC1 gene expression. For example, inhibition of MARC1 expression may be manifested by a reduction of the amount of MARC1 mRNA which may be isolated from or detected in a first cell or group of cells in which a MARC1 gene is transcribed and which has or have been treated such that the expression of a MARC1 gene is inhibited, as compared to a control. The control may be a second cell or group of cells substantially identical to the first cell or group of cells, except that the second cell or group of cells have not been so treated (control cells). The degree of inhibition is usually expressed as a percentage of a control level, e.g.,

$$\frac{( mRNA in control cells ) - ( mRNA in treated cells )}{( mRNA in control cells )} \cdot 100 \%$$

[0092] Alternatively, the degree of inhibition may be given in terms of a reduction of a parameter that is functionally linked to MARC1 gene expression, e.g., the amount of protein encoded by a MARC1 gene. The reduction of a parameter functionally linked to MARC1 gene expression may similarly be expressed as a percentage of a control level. In principle, MARC1 gene silencing may be determined in any cell expressing MARC1, either constitutively or by genomic engineering, and by any appropriate assay.

[0093] For example, in certain instances, expression of a MARC1 gene is suppressed by at least about 10%, 15%, 20%, 25%, 30%, 35%, 40%, 45%, or 50% by administration of an iRNA disclosed herein. In some embodiments, a MARC1 gene is suppressed by at least about 60%, 65%, 70%, 75%, or 80% by administration of an iRNA disclosed herein. In some embodiments, MARC1 gene is suppressed by at least about 85%, 90%, 95%, 98%, 99%, or more by administration of an iRNA as described herein.

[0094] The term “antisense strand” or “guide strand” refers to the strand of an iRNA, e.g., a dsRNA, which includes a region that is substantially complementary to a target sequence.

[0095] As used herein, the term “region of complementarity” refers to the region on the antisense strand that is substantially complementary to a sequence, for example a target sequence, as defined herein. Where the region of complementarity is not fully complementary to the target sequence, the mismatches may be in the internal or terminal regions of the molecule. In some embodiments, the region of complementarity comprises 0, 1, or 2 mismatches.

[0096] The term “sense strand” or “passenger strand” as used herein, refers to the strand of an iRNA that includes a region that is substantially complementary to a region of the antisense strand as that term is defined herein.

[0097] The terms “blunt” or “blunt ended” as used herein in reference to a dsRNA mean that there are no unpaired nucleotides or nucleotide analogs at a given terminal end of a dsRNA, i.e., no nucleotide overhang. One or both ends of a dsRNA can be blunt. Where both ends of a dsRNA are blunt, the dsRNA is said to be blunt ended. To be clear, a “blunt ended” dsRNA is a dsRNA that is blunt at both ends, i.e., no nucleotide overhang at either end of the molecule. Most often such a molecule will be double-stranded over its entire length.

[0098] As used herein, and unless otherwise indicated, the term “complementary,” when used to describe a first nucleotide sequence in relation to a second nucleotide sequence, refers to the ability of an oligonucleotide or polynucleotide comprising the first nucleotide sequence to hybridize and form a duplex structure under certain conditions with an oligonucleotide or polynucleotide comprising the second nucleotide sequence, as will be understood by the skilled person. Such conditions can, for example, be stringent conditions, where stringent conditions may include: 400 mM NaCl, 40 mM PIPES pH 6.4, 1 mM EDTA, 50° C. or 70° C. for 12-16 hours followed by washing. Other conditions, such as physiologically relevant conditions as may be encountered inside an organism, can apply. The skilled person will be able to determine the set of conditions most appropriate for a test of complementarity of two sequences in accordance with the ultimate application of the hybridized nucleotides.

[0099] Complementary sequences within an iRNA, e.g., within a dsRNA as described herein, include base-pairing of the oligonucleotide or polynucleotide comprising a first nucleotide sequence to an oligonucleotide or polynucleotide comprising a second nucleotide sequence over the entire length of one or both nucleotide sequences. Such sequences can be referred to as “fully complementary” with respect to each other herein. However, where a first sequence is referred to as “substantially complementary” with respect to a second sequence herein, the two sequences can be fully complementary, or they may form one or more, but generally not more than 5, 4, 3 or 2 mismatched base pairs upon hybridization for a duplex up to 30 base pairs, while retaining the ability to hybridize under the conditions most relevant to their ultimate application, e.g., inhibition of gene expression via a RISC pathway. However, where two oligonucleotides are designed to form, upon hybridization, one or more single stranded overhangs, such overhangs shall not be regarded as mismatches with regard to the determination of complementarity. For example, a dsRNA comprising one oligonucleotide 21 nucleotides in length and another oligonucleotide 23 nucleotides in length, wherein the longer oligonucleotide comprises a sequence of 21 nucleotides that is fully complementary to the shorter oligonucleotide, may yet be referred to as “fully complementary” for the purposes described herein.

[0100] Complementary sequences, as used herein, may also include, or be formed entirely from, non-Watson-Crick base pairs and/or base pairs formed from non-natural and modified nucleotides, in as far as the above requirements with respect to their ability to hybridize are fulfilled. Such non-Watson-Crick base pairs includes, but are not limited to, G:U Wobble or Hoogstein base pairing.

[0101] The terms “complementary,” “fully complementary” and “substantially complementary” herein may be used with respect to the base matching between the sense strand and the antisense strand of a dsRNA, or between the antisense strand of an iRNA agent and a target sequence, as will be understood from the context of their use.

[0102] As used herein, a polynucleotide that is “substantially complementary to at least part of” a messenger RNA (mRNA) refers to a polynucleotide that is substantially complementary to a contiguous portion of the mRNA of interest (e.g., an mRNA encoding a MARC1 protein). For example, a polynucleotide is complementary to at least a part of a MARC1 mRNA if the sequence is substantially complementary to a non-interrupted portion of an mRNA encoding MARC1. The term “complementarity” refers to the capacity for pairing between nucleobases of a first nucleic acid and a second nucleic acid.

[0103] As used herein, the term “region of complementarity” refers to the region of one nucleotide sequence agent that is substantially complementary to another sequence, e.g., the region of a sense sequence and corresponding antisense sequence of a dsRNA, or the antisense strand of an iRNA and a target sequence, e.g., an MARC1 nucleotide sequence, as defined herein. Where the region of complementarity is not fully complementary to the target sequence, the mismatches can be in the internal or terminal regions of the antisense strand of the iRNA. Generally, the most tolerated mismatches are in the terminal regions, e.g., within 5, 4, 3, or 2 nucleotides of the 5′- or 3′-terminus of the iRNA agent.

[0104] “Contacting,” as used herein, includes directly contacting a cell, as well as indirectly contacting a cell. For example, a cell within a subject may be contacted when a composition comprising an iRNA is administered (e.g., intravenously or subcutaneously) to the subject.

[0105] As used herein, “a disorder related to MARC1 expression,” a “disease related to MARC1 expression, a “pathological process related to MARC1 expression,” or the like includes any condition, disorder, or disease in which a MARC1 is present. In some embodiments, MARC1 expression in the subject having the disorder is altered (e.g., decreased or increased relative to a reference level (e.g., a level characteristic of a non-diseased subject)). In some embodiments, the decrease or increase in MARC1 expression is detectable in a tissue sample from the subject (e.g., in a liver sample). The decrease or increase may be assessed relative the level observed in the same individual prior to the development of the disorder or relative to other individual(s) who do not have the disorder. The decrease or increase may be limited to a particular organ, tissue, or region of the body (e.g., the liver). MARC1-associated disorders include, but are not limited to, a liver disease or disorder, e.g., a metabolic disorder (e.g., nonalcoholic fatty liver disease (NAFLD) or nonalcoholic steatohepatitis (NASH)) or hepatic fibrosis.

[0106] The term “double-stranded RNA,” “dsRNA,” or “siRNA” as used herein, refers to an iRNA that includes an RNA molecule or complex of molecules having a hybridized duplex region that comprises two anti-parallel and substantially complementary nucleic acid strands, which will be referred to as having “sense” and “antisense” orientations with respect to a target RNA. The duplex region can be of any length that permits specific degradation of a desired target RNA, e.g., through a RISC pathway, but will typically range from 9 to 36 base pairs in length, e.g., 15-30 base pairs in length. Considering a duplex between 9 and 36 base pairs, the duplex can be any length in this range, for example, 9, 10, 11, 12, 13, 14, 15, 16, 17, 18, 19, 20, 21, 22, 23, 24, 25, 26, 27, 28, 29, 30, 31, 32, 33, 34, 35, or 36 and any sub-range therein between, including, but not limited to 15-30 base pairs, 15-26 base pairs, 15-23 base pairs, 15-22 base pairs, 15-21 base pairs, 15-20 base pairs, 15-19 base pairs, 15-18 base pairs, 15-17 base pairs, 18-30 base pairs, 18-26 base pairs, 18-23 base pairs, 18-22 base pairs, 18-21 base pairs, 18-20 base pairs, 19-30 base pairs, 19-26 base pairs, 19-23 base pairs, 19-22 base pairs, 19-21 base pairs, 19-20 base pairs, 20-30 base pairs, 20-26 base pairs, 20-25 base pairs, 20-24 base pairs, 20-23 base pairs, 20-22 base pairs, 20-21 base pairs, 21-30 base pairs, 21-26 base pairs, 21-25 base pairs, 21-24 base pairs, 21-23 base pairs, or 21-22 base pairs. dsRNAs generated in the cell by processing with Dicer and similar enzymes are generally in the range of 19-22 base pairs in length. One strand of the duplex region of a dsDNA comprises a sequence that is substantially complementary to a region of a target RNA. The two strands forming the duplex structure can be from a single RNA molecule having at least one self-complementary region, or can be formed from two or more separate RNA molecules. Where the duplex region is formed from two strands of a single molecule, the molecule can have a duplex region separated by a single stranded chain of nucleotides (herein referred to as a “hairpin loop”) between the 3′-end of one strand and the 5′-end of the respective other strand forming the duplex structure. The hairpin loop can comprise at least one unpaired nucleotide; in some embodiments the hairpin loop can comprise at least 3, at least 4, at least 5, at least 6, at least 7, at least 8, at least 9, at least 10, at least 20, at least 23 or more unpaired nucleotides. Where the two substantially complementary strands of a dsRNA are comprised by separate RNA molecules, those molecules need not, but can be covalently connected. In some embodiments, the two strands are connected covalently by means other than a hairpin loop, and the connecting structure is a linker.

[0107] In some embodiments, the iRNA agent may be a “single-stranded siRNA” that is introduced into a cell or organism to inhibit a target mRNA. In some embodiments, single-stranded RNAi agents can bind to the RISC endonuclease Argonaute 2, which then cleaves the target mRNA. The single-stranded siRNAs are generally 15-30 nucleotides and are optionally chemically modified. The design and testing of single-stranded siRNAs are described in U.S. Pat. No. 8,101,348 and in Lima et al., (2012) Cell 150: 883-894, the entire contents of each of which are hereby incorporated herein by reference. Any of the antisense nucleotide sequences described herein (e.g., sequences provided in Tables 2A-2B, 3A-3B, or 4A-4B) may be used as a single-stranded siRNA as described herein and optionally as chemically modified, e.g., as described herein, e.g., by the methods described in Lima et al., (2012) Cell 150:883-894.

[0108] In one aspect, an RNA interference agent includes a single stranded RNA that interacts with a target RNA sequence to direct the cleavage of the target RNA. Without wishing to be bound by theory, long double stranded RNA introduced into cells is broken down into siRNA by a Type III endonuclease known as Dicer (Sharp et al., Genes Dev. 2001, 15:485). Dicer, a ribonuclease-III-like enzyme, processes the dsRNA into 19-23 base pair short interfering RNAs with characteristic two base 3′ overhangs (Bernstein, et al., (2001) Nature 409:363). The siRNAs are then incorporated into an RNA-induced silencing complex (RISC) where one or more helicases unwind the siRNA duplex, enabling the complementary antisense strand to guide target recognition (Nykanen, et al., (2001) Cell 107:309). Upon binding to the appropriate target mRNA, one or more endonucleases within the RISC cleaves the target to induce silencing (Elbashir, et al., (2001) Genes Dev. 15:188). Thus, in one aspect the disclosure relates to a single stranded RNA that promotes the formation of a RISC complex to effect silencing of the target gene.

[0109] “G,” “C,” “A,” “T” and “U” each generally stand for a nucleotide that contains guanine, cytosine, adenine, thymidine and uracil as a base, respectively. However, it will be understood that the terms “deoxyribonucleotide,” “ribonucleotide,” or “nucleotide” can also refer to a modified nucleotide, as further detailed below, or a surrogate replacement moiety. The skilled person is well aware that guanine, cytosine, adenine, and uracil may be replaced by other moieties without substantially altering the base pairing properties of an oligonucleotide comprising a nucleotide bearing such replacement moiety. For example, without limitation, a nucleotide comprising inosine as its base may base pair with nucleotides containing adenine, cytosine, or uracil. Hence, nucleotides containing uracil, guanine, or adenine may be replaced in the nucleotide sequences of dsRNA featured in the disclosure by a nucleotide containing, for example, inosine. In another example, adenine and cytosine anywhere in the oligonucleotide can be replaced with guanine and uracil, respectively to form G-U Wobble base pairing with the target mRNA. Sequences containing such replacement moieties are suitable for the compositions and methods featured in the disclosure.

[0110] As used herein, the term “fibrosis” refers to the formation of fibrous tissue as a reparative or reactive process, rather than as a normal constituent of an organ or tissue. Fibrosis is typically characterized by fibroblast accumulation and collagen deposition in excess of normal deposition in any particular tissue. Fibrosis typically occurs as the result of inflammation, irritation, or healing.

[0111] As used herein, the terms “hepatic fibrosis” refers to the fibrosis present and/or occurring in the liver.

[0112] As used herein, the term “iRNA,” “RNAi”, “iRNA agent,” or “RNAi agent” or “RNAi molecule” refers to an agent that contains RNA as that term is defined herein, and which mediates the targeted cleavage of an RNA transcript, e.g., via an RNA-induced silencing complex (RISC) pathway. In some embodiments, an iRNA as described herein effects inhibition of MARC1 expression, e.g., in a cell or mammal. Inhibition of MARC1 expression may be assessed based on a reduction in the level of MARC1 mRNA or a reduction in the level of the MARC1 protein.

[0113] “Introducing into a cell,” when referring to an iRNA, means facilitating or effecting uptake or absorption into the cell, as is understood by those skilled in the art. Absorption or uptake of an iRNA can occur through unaided diffusive or active cellular processes, or by auxiliary agents or devices. The meaning of this term is not limited to cells in vitro; an iRNA may also be “introduced into a cell,” wherein the cell is part of a living organism. In such an instance, introduction into the cell will include the delivery to the organism. For example, for in vivo delivery, iRNA can be injected into a tissue site or administered systemically. In vivo delivery can also be by a β-glucan delivery system, such as those described in U.S. Pat. Nos. 5,032,401 and 5,607,677, and U.S. Publication No. 2005/0281781, which are hereby incorporated by reference in their entirety. In vitro introduction into a cell includes methods known in the art such as electroporation and lipofection. Further approaches are described herein below or known in the art.

[0114] The term “linker” or “linking group” means an organic moiety that connects two parts of a compound, e.g., covalently attaches two parts of a compound.

[0115] As used herein, the term “modulate the expression of,” refers to an at least partial “inhibition” of a gene (e.g., a MARC1 gene) expression in a cell treated with an iRNA composition as described herein compared to the expression of the corresponding gene in a control cell. A control cell includes an untreated cell, or a cell treated with a non-targeting control iRNA.

[0116] The skilled artisan will recognize that the term “RNA molecule” or “ribonucleic acid molecule” encompasses not only RNA molecules as expressed or found in nature, but also analogs and derivatives of RNA comprising one or more ribonucleotide/ribonucleoside analogs or derivatives as described herein or as known in the art. Strictly speaking, a “ribonucleoside” includes a nucleoside base and a ribose sugar, and a “ribonucleotide” is a ribonucleoside with one, two or three phosphate moieties or analogs thereof (e.g., phosphorothioate). However, the terms “ribonucleoside” and “ribonucleotide” can be considered to be equivalent as used herein. The RNA can be modified in the nucleobase structure, in the ribose structure, or in the ribose-phosphate backbone structure, e.g., as described herein below. However, the molecules comprising ribonucleoside analogs or derivatives must retain the ability to form a duplex. As non-limiting examples, an RNA molecule can also include at least one modified ribonucleoside including but not limited to a 2′-O-methyl modified nucleoside, a nucleoside comprising a 5′ phosphorothioate group, a terminal nucleoside linked to a cholesteryl derivative or dodecanoic acid bisdecylamide group, a locked nucleoside, an abasic nucleoside, an acyclic nucleoside, a glycol nucleotide, a 2′-deoxy-2′-fluoro modified nucleoside, a 2′-amino-modified nucleoside, 2′-alkyl-modified nucleoside, morpholino nucleoside, a phosphoramidate or a non-natural base comprising nucleoside, or any combination thereof. Alternatively or in combination, an RNA molecule can comprise at least two modified ribonucleosides, at least 3, at least 4, at least 5, at least 6, at least 7, at least 8, at least 9, at least 10, at least 15, at least 20 or more, up to the entire length of the dsRNA molecule. The modifications need not be the same for each of such a plurality of modified ribonucleosides in an RNA molecule. In some embodiments, modified RNAs contemplated for use in methods and compositions described herein are peptide nucleic acids (PNAs) that have the ability to form the required duplex structure and that permit or mediate the specific degradation of a target RNA, e.g., via a RISC pathway. For clarity, it is understood that the term “iRNA” does not encompass a naturally-occurring double stranded DNA molecule or a 100% deoxynucleoside-containing DNA molecule.

[0117] In some aspects, a modified ribonucleoside includes a deoxyribonucleoside. In such an instance, an iRNA agent can comprise one or more deoxynucleosides, including, for example, a deoxynucleoside overhang(s), or one or more deoxynucleosides within the double stranded portion of a dsRNA. In certain embodiments, the RNA molecule comprises a percentage of deoxyribonucleosides of at least 5, 10, 15, 20, 25, 30, 35, 40, 45, 50, 55, 60, 65, 70, 75, 80, 85, 90, 95% or higher (but not 100%) deoxyribonucleosides, e.g., in one or both strands.

[0118] As used herein, the term “nucleotide overhang” refers to at least one unpaired nucleotide that protrudes from the duplex structure of an iRNA, e.g., a dsRNA. For example, when a 3′-end of one strand of a dsRNA extends beyond the 5′-end of the other strand, or vice versa, there is a nucleotide overhang. A dsRNA can comprise an overhang of at least one nucleotide; alternatively the overhang can comprise at least two nucleotides, at least three nucleotides, at least four nucleotides, or at least five nucleotides or more. A nucleotide overhang can comprise or consist of a nucleotide/nucleoside analog, including a deoxynucleotide/nucleoside. The overhang(s) may be on the sense strand, the antisense strand or any combination thereof. Furthermore, the nucleotide(s) of an overhang can be present on the 5′ end, 3′ end or both ends of either an antisense or sense strand of a dsRNA.

[0119] In some embodiments, the antisense strand of a dsRNA has a 1-10 nucleotide overhang at the 3′ end and/or the 5′ end. In some embodiments, the sense strand of a dsRNA has a 1-10 nucleotide overhang at the 3′ end and/or the 5′ end. In some embodiments, one or more of the nucleotides in the overhang is replaced with a nucleoside thiophosphate.

[0120] As used herein, a “pharmaceutical composition” comprises a pharmacologically effective amount of a therapeutic agent (e.g., an iRNA) and a pharmaceutically acceptable carrier. As used herein, “pharmacologically effective amount,” “therapeutically effective amount” or simply “effective amount” refers to that amount of an agent (e.g., iRNA) effective to produce the intended pharmacological, therapeutic or preventive result. For example, in a method of treating a disorder related to MARC1 expression (e.g., hepatic fibrosis or a metabolic disorder (e.g., nonalcoholic fatty liver disease (NAFLD) or non-alcoholic steatohepatitis (NASH)), an effective amount includes an amount effective to reduce one or more symptoms associated with the disorder, an amount effective to reduce one or more of tumor size or tumor burden, or an amount effective to reduce the risk of developing conditions associated with the disorder. For example, if a given clinical treatment is considered effective when there is at least a 10% reduction in a measurable parameter associated with a disease or disorder, a therapeutically effective amount of a drug for the treatment of that disease or disorder is the amount necessary to obtain at least a 10% reduction in that parameter. For example, a therapeutically effective amount of an iRNA targeting MARC1 can reduce a level of MARC1 mRNA or a level of a MARC1 protein by any measurable amount, e.g., by at least 10%, 15%, 20%, 25%, 30%, 35%, 40%, 45%, 50%, 55%, 60%, 65%, 70%, 75%, 80%, 85%, 90%, or 95%.

[0121] The term “pharmaceutically acceptable carrier” refers to a carrier for administration of a therapeutic agent. Such carriers include, but are not limited to, saline, buffered saline, dextrose, water, glycerol, ethanol, and combinations thereof. The term specifically excludes cell culture medium. For drugs administered orally, pharmaceutically acceptable carriers include, but are not limited to pharmaceutically acceptable excipients such as inert diluents, disintegrating agents, binding agents, lubricating agents, sweetening agents, flavoring agents, coloring agents and preservatives. Suitable inert diluents include sodium and calcium carbonate, sodium and calcium phosphate, and lactose, while corn starch and alginic acid are suitable disintegrating agents. Binding agents may include starch and gelatin, while the lubricating agent, if present, will generally be magnesium stearate, stearic acid or talc. If desired, the tablets may be coated with a material such as glyceryl monostearate or glyceryl distearate, to delay absorption in the gastrointestinal tract. Agents included in drug formulations are described further herein below.

[0122] As used herein, the term “SNALP” refers to a stable nucleic acid-lipid particle. A SNALP represents a vesicle of lipids coating a reduced aqueous interior comprising a nucleic acid such as an iRNA or a plasmid from which an iRNA is transcribed. SNALPs are described, e.g., in U.S. Patent Application Publication Nos. 2006/0240093, 2007/0135372, and in International Application No. WO 2009/082817. These applications are incorporated herein by reference in their entirety. In some embodiments, the SNALP is a SPLP. As used herein, the term “SPLP” refers to a nucleic acid-lipid particle comprising plasmid DNA encapsulated within a lipid vesicle.

[0123] As used herein, the term “strand comprising a sequence” refers to an oligonucleotide comprising a chain of nucleotides that is described by the sequence referred to using the standard nucleotide nomenclature.

[0124] As used herein, a “subject” to be treated according to the methods described herein, includes a human or non-human animal, e.g., a mammal. The mammal may be, for example, a rodent (e.g., a rat or mouse), a primate (e.g., a monkey), or a canine (e.g., a dog). In some embodiments, the subject is a human.

[0125] A “subject in need thereof” includes a subject having, suspected of having, or at risk of developing a disorder related to MARC1 expression. In some embodiments, the subject has, or is suspected of having, a disorder related to MARC1 expression. In some embodiments, the subject is at risk of developing a disorder related to MARC1 expression.

[0126] As used herein, “target sequence” refers to a contiguous portion of the nucleotide sequence of an mRNA molecule formed during the transcription of a gene, e.g., a MARC1 gene, including mRNA that is a product of RNA processing of a primary transcription product. The target portion of the sequence will be at least long enough to serve as a substrate for iRNA-directed cleavage at or near that portion. For example, the target sequence will generally be from 9-36 nucleotides in length, e.g., 15-30 nucleotides in length, including all sub-ranges therebetween. As non-limiting examples, the target sequence can be from 15-30 nucleotides, 15-26 nucleotides, 15-23 nucleotides, 15-22 nucleotides, 15-21 nucleotides, 15-20 nucleotides, 15-19 nucleotides, 15-18 nucleotides, 15-17 nucleotides, 18-30 nucleotides, 18-26 nucleotides, 18-23 nucleotides, 18-22 nucleotides, 18-21 nucleotides, 18-20 nucleotides, 19-30 nucleotides, 19-26 nucleotides, 19-23 nucleotides, 19-22 nucleotides, 19-21 nucleotides, 19-20 nucleotides, 20-30 nucleotides, 20-26 nucleotides, 20-25 nucleotides, 20-24 nucleotides, 20-23 nucleotides, 20-22 nucleotides, 20-21 nucleotides, 21-30 nucleotides, 21-26 nucleotides, 21-25 nucleotides, 21-24 nucleotides, 21-23 nucleotides, or 21-22 nucleotides.

[0127] As used herein, the phrases “therapeutically effective amount” and “prophylactically effective amount” and the like refer to an amount that provides a therapeutic benefit in the treatment, prevention, or management of any disorder or pathological process related to MARC1 expression. The specific amount that is therapeutically effective may vary depending on factors known in the art, such as, for example, the type of disorder or pathological process, the patient's history and age, the stage of the disorder or pathological process, and the administration of other therapies.

[0128] In the context of the present disclosure, the terms “treat,” “treatment,” and the like mean to prevent, delay, relieve or alleviate at least one symptom associated with a disorder related to MARC1 expression, or to slow or reverse the progression or anticipated progression of such a disorder. For example, the methods featured herein, when employed to treat a liver disease or disorder described herein, may serve to reduce or prevent one or more symptoms of liver disease or disorder, e.g., a metabolic disease or hepatic fibrosis, or to reduce the risk or severity of associated conditions. Thus, unless the context clearly indicates otherwise, the terms “treat,” “treatment,” and the like are intended to encompass prophylaxis, e.g., prevention of disorders and/or symptoms of disorders related to MARC1 expression. Treatment can also mean prolonging survival as compared to expected survival in the absence of treatment.

[0129] By “lower” in the context of a disease marker or symptom is meant any decrease, e.g., a statistically or clinically significant decrease in such level. The decrease can be, for example, at least 10%, at least 20%, at least 30%, at least 40%, at least 40%, at least 50%, at least 60%, at least 70%, at least 80%, or at least 90%. The decrease can be down to a level accepted as within the range of normal for an individual without such disorder.

[0130] As used herein, “MARC1” refers to a “Mitochondrial amidoxime-reducing component 1” (MARC1) gene, the corresponding mRNA (“MARC1 mRNA”), or the corresponding protein (“MARC1 protein”). MARC1 is also referred to as “MTARC1,” “MOCO sulphurase C-terminal domain containing 1,” or “MOSC1”. The sequence of a human MARC1 mRNA transcript can be found at SEQ ID NO: 1, SEQ ID NO: 4000, SEQ ID NO: 4003, SEQ ID NO: 4005, SEQ ID NO: 4007, or SEQ ID NO: 4009. The sequence of a murine MARC1 mRNA transcript can be found at SEQ ID NO: 4011. In some embodiments, the MARC1 gene, MARC1 mRNA, and MARC1 protein can be from any vertebrate or mammalian source, including but not limited to, human, rodent, mouse, rat, primate, monkey, canine, or dog, unless otherwise specified.

[0131] In the event of a discrepancy between the recited positions of the duplexes presented herein and the alignment of the duplexes to the recited sequences, the alignment of the duplexes to the recited sequence will govern.

### II. iRNA Agents

[0132] Described herein are iRNA agents that modulate (e.g., inhibit) the expression of a MARC1 gene.

[0133] In some embodiments, the iRNA agent includes double-stranded ribonucleic acid (dsRNA) molecules for inhibiting the expression of a MARC1 gene in a cell or in a subject (e.g., in a mammal, e.g., in a human), where the dsRNA includes an antisense strand having a region of complementarity which is complementary to at least a part of an mRNA formed in the expression of a MARC1 gene, and where the region of complementarity is 30 nucleotides or less in length, generally 19-24 nucleotides in length, and where the dsRNA, upon contact with a cell expressing the MARC1 gene, inhibits the expression of the MARC1 gene, e.g., by at least 10%, 20%, 30%, 40%, or 50%.

[0134] The modulation (e.g., inhibition) of expression of the MARC1 gene can be assayed by, for example, a PCR or branched DNA (bDNA)-based method, or by a protein-based method, such as by Western blot. Expression of a MARC1 gene in cell culture, such as in COS cells, HeLa cells, primary hepatocytes, HepG2 cells, primary cultured cells or in a biological sample from a subject can be assayed by measuring MARC1 mRNA levels, such as by bDNA or TaqMan assay, or by measuring protein levels, such as by immunofluorescence analysis, using, for example, Western Blotting or flow cytometric techniques.

[0135] A dsRNA typically includes two RNA strands that are sufficiently complementary to hybridize to form a duplex structure under conditions in which the dsRNA will be used. One strand of a dsRNA (the antisense strand) typically includes a region of complementarity that is substantially complementary, and generally fully complementary, to a target sequence, derived from the sequence of an mRNA formed during the expression of a MARC1 gene. The other strand (the sense strand) typically includes a region that is complementary to the antisense strand, such that the two strands hybridize and form a duplex structure when combined under suitable conditions. Generally, the duplex structure is between 15 and 30 inclusive, more generally between 18 and 25 inclusive, yet more generally between 19 and 24 inclusive, and most generally between 19 and 21 base pairs in length, inclusive. Similarly, the region of complementarity to the target sequence is between 15 and 30 inclusive, more generally between 18 and 25 inclusive, yet more generally between 19 and 24 inclusive, and most generally between 19 and 21 nucleotides in length, inclusive.

[0136] In some embodiments, the dsRNA is between 15 and 20 nucleotides in length, inclusive, and in other embodiments, the dsRNA is between 25 and 30 nucleotides in length, inclusive. As the ordinarily skilled person will recognize, the targeted region of an RNA targeted for cleavage will most often be part of a larger RNA molecule, often an mRNA molecule. Where relevant, a “part” of an mRNA target is a contiguous sequence of an mRNA target of sufficient length to be a substrate for RNAi-directed cleavage (i.e., cleavage through a RISC pathway). dsRNAs having duplexes as short as 9 base pairs can, under some circumstances, mediate RNAi-directed RNA cleavage. Most often a target will be at least 15 nucleotides in length, e.g., 15-30 nucleotides in length.

[0137] One of skill in the art will also recognize that the duplex region is a primary functional portion of a dsRNA, e.g., a duplex region of 9 to 36, e.g., 15-30 base pairs. Thus, in some embodiments, to the extent that it becomes processed to a functional duplex of e.g., 15-30 base pairs that targets a desired RNA for cleavage, an RNA molecule or complex of RNA molecules having a duplex region greater than 30 base pairs is a dsRNA. Thus, an ordinarily skilled artisan will recognize that in some embodiments, then, an miRNA is a dsRNA. In some embodiments, a dsRNA is not a naturally occurring miRNA. In some embodiments, an iRNA agent useful to target MARC1 expression is not generated in the target cell by cleavage of a larger dsRNA.

[0138] A dsRNA as described herein may further include one or more single-stranded nucleotide overhangs. The dsRNA can be synthesized by standard methods known in the art as further discussed below, e.g., by use of an automated DNA synthesizer, such as are commercially available from, for example, Biosearch, Applied Biosystems, Inc.

[0139] In some embodiments, a MARC1 gene is a human MARC1 gene. In some embodiments, a MARC1 gene is a rodent MARC1 gene, e.g., a rat MARC1 gene or a mouse MARC1 gene. In some embodiments, a MARC1 gene is a mouse MARC1 gene. In some embodiments, a MARC1 gene is a primate MARC1 gene, e.g., a cynomolgus monkey MARC1 gene. In some embodiments, a MARC1 gene is a canine MARC1 gene, e.g., a dog MARC1 gene.

[0140] In specific embodiments, the dsRNA comprises a sense strand that comprises or consists of a sense sequence selected from the sense sequences provided in Tables 2A, 2B, 3A, 3B, 4A, or 4B and an antisense strand that comprises or consists of an antisense sequence selected from the antisense sequences provided in Tables 2A, 2B, 3A, 3B, 4A, or 4B.

[0141] In some aspects, a dsRNA will include at least sense and antisense nucleotide sequences, whereby the sense strand is selected from the sequences provided in Tables 2A, 2B, 3A, 3B, 4A, or 4B, and the corresponding antisense strand is selected from the sequences provided in Tables 2A, 2B, 3A, 3B, 4A, or 4B.

[0142] In these aspects, one of the two sequences is complementary to the other of the two sequences, with one of the sequences being substantially complementary to a sequence of an mRNA generated by the expression of a MARC1 gene. As such, a dsRNA will include two oligonucleotides, where one oligonucleotide is described as the sense strand, and the second oligonucleotide is described as the corresponding antisense strand. As described elsewhere herein and as known in the art, the complementary sequences of a dsRNA can also be contained as self-complementary regions of a single nucleic acid molecule, as opposed to being on separate oligonucleotides.

[0143] The skilled person is well aware that dsRNAs having a duplex structure of between 20 and 23, but specifically 21, base pairs have been hailed as particularly effective in inducing RNA interference (Elbashir et al., EMBO 2001, 20:6877-6888). However, others have found that shorter or longer RNA duplex structures can be effective as well.

[0144] In the embodiments described above, by virtue of the nature of the oligonucleotide sequences provided in Tables 2A-2B, 3A-3B, or 4A-4B, dsRNAs described herein can include at least one strand of a length of minimally 19 nucleotides. It can be reasonably expected that shorter duplexes having one of the sequences of Tables 2A-2B, 3A-3B, or 4A-4B minus only a few nucleotides on one or both ends will be similarly effective as compared to the dsRNAs described above.

[0145] In some embodiments, the dsRNA has a partial sequence of at least 15, 16, 17, 18, 19, 20, or more contiguous nucleotides from one of the sequences of Tables 2A-2B, 3A-3B, or 4A-4B.

[0146] In some embodiments, the dsRNA has an antisense sequence that comprises at least 15, 16, 17, 18, or 19 contiguous nucleotides of an antisense sequence provided in Tables 2A-2B, 3A-3B, or 4A-4B and a sense sequence that comprises at least 15, 16, 17, 18, or 19 contiguous nucleotides of a corresponding sense sequence provided in Tables 2A-2B, 3A-3B, or 4A-4B.

[0147] In some embodiments, the dsRNA comprises an antisense sequence that comprises at least 15, 16, 17, 18, 19, 20, 21, 22, or 23 contiguous nucleotides of an antisense sequence provided in Table 2A, 2B, 3A, 3B, 4A, or 4B, and a sense sequence that comprises at least 15, 16, 17, 18, 19, 20, or 21 contiguous nucleotides of a corresponding sense sequence provided in Table 2A, 2B, 3A, 3B, 4A, or 4B.

[0148] In some such embodiments, the dsRNA, although it comprises only a portion of the sequences provided in Tables 2A-2B, 3A-3B, or 4A-4B is equally effective in inhibiting a level of MARC1 expression as is a dsRNA that comprises the full-length sequences provided in Tables 2A-2B, 3A-3B, or 4A-4B. In some embodiments, the dsRNA differs in its inhibition of a level of expression of a MARC1 gene by not more than 5, 10, 15, 20, 25, 30, 35, 40, 45, or 50% inhibition compared with a dsRNA comprising the full sequence disclosed herein.

[0149] In some embodiments, an iRNA described herein comprises an antisense strand comprising at least 15 contiguous nucleotides, with 0, 1, 2, or 3 mismatches, of a portion of nucleotide sequence of SEQ ID NO: 2. In some embodiments, an iRNA described herein comprises a sense strand comprising at least 15 contiguous nucleotides, with 0, or 1, 2, or 3 mismatches, of the corresponding portion of the nucleotide sequence of SEQ ID NO: 1.

[0150] In some embodiments, an iRNA described herein comprises an antisense strand comprising at least 15 contiguous nucleotides, with 0, 1, 2, or 3 mismatches, of a portion of nucleotide sequence of SEQ ID NO: 4001. In some embodiments, an iRNA described herein comprises a sense strand comprising at least 15 contiguous nucleotides, with 0, or 1, 2, or 3 mismatches, of the corresponding portion of the nucleotide sequence of SEQ ID NO: 4000.

A human MARC1 mRNA may have the sequence of SEQ ID NO: 1 provided herein.
(SEQ ID NO: 1)
ACAGCGCCCTGCAGCGCAGGCGACGGAAGGTTGCAGAGGCAGTGGGGCGCCGACCAAGTGGAAGCTGAGCCACCACC
TCCCACTCCCCGCGCCGCCCCCCAGAAGGACGCACTGCTCTGATTGGCCCGGAAGGGTTCAGGAGCTGCCCAGCCTT
TGGGCTCGGGGCCAAAGGCCGCACCTTCCCCCAGCGGCCCCGGGCGACCAGCGCGCTCCGGCCTTGCCGCCGCCACC
TCGCGGAGAAGCCAGCCATGGGCGCCGCCGGCTCCTCCGCGCTGGCGCGCTTTGTCCTCCTCGCGCAATCCCGGCCC
GGGTGGCTCGGGGTTGCCGCGCTGGGCCTGACCGCGGTGGCGCTGGGGGCTGTCGCCTGGCGCCGCGCATGGCCCAC
GCGGCGCCGGCGGCTGCTGCAGCAGGTGGGCACAGTGGCGCAGCTCTGGATCTACCCTGTGAAATCCTGCAAGGGGG
TGCCGGTGAGCGAGGCGGAGTGCACGGCCATGGGGCTGCGCAGCGGCAACCTGCGGGACAGGTTTTGGCTTGTGATC
AACCAGGAGGGAAACATGGTTACTGCTCGCCAGGAACCTCGCCTGGTCCTGATTTCCCTGACCTGCGATGGTGACAC
CCTGACTCTCAGTGCAGCCTACACAAAGGACCTACTACTGCCTATCAAAACGCCCACCACAAATGCAGTGCACAAGT
GCAGAGTGCACGGCCTGGAGATAGAGGGCAGGGACTGTGGCGAGGCCACCGCCCAGTGGATAACCAGCTTCCTGAAG
TCACAGCCCTACCGCCTGGTGCACTTCGAGCCTCACATGCGACCGAGACGTCCTCATCAAATAGCAGACTTGTTCCG
ACCCAAGGACCAGATTGCTTACTCAGACACCAGCCCATTCTTGATCCTTTCTGAGGCGTCGCTGGCGGATCTCAACT
CCAGGCTAGAGAAGAAAGTTAAAGCAACCAACTTCAGGCCCAATATTGTAATTTCAGGATGCGATGTCTATGCAGAG
GTAACACTATGCCCCTTTGGATCTTTCCTTGGATTTGACTTCTTTTTTAAGGATTCTTGGGATGAGCTTCTTATTGG
TGACGTGGAACTGAAAAGGGTGATGGCTTGTTCCAGATGCATTTTAACCACAGTGGACCCAGACACCGGTGTCATGA
GCAGGAAGGAACCGCTGGAAACACTGAAGAGTTATCGCCAGTGTGACCCTTCAGAACGAAAGTTATATGGAAAATCA
CCACTCTTTGGGCAGTATTTTGTGCTGGAAAACCCAGGGACCATCAAAGTGGGAGACCCTGTGTACCTGCTGGGCCA
GTAATGGGAACCGTATGTCCTGGAATATTAGATGCCTTTTAAAAATGTTCTCAAAAATGACAACACTTGAAGCATGG
TGTTTCAGAACTGAGACCTCTACATTTTCTTTAAATTTGTGATTTTCACATTTTTCGTCTTTTGGACTTCTGGTGTC
TCAATGCTTCAATGTCCCAGTGCAAAAAGTAAAGAAATATAGTCTCAATAACTTAGTAGGACTTCAGTAAGTCACTT
AAATGACAAGACAGGATTCTGAAAACTCCCCGTTTAACTGATTATGGAATAGTTCTTTCTCCTGCTTCTCCGTTTAT
CTACCAAGAGCGCAGACTTGCATCCTGTCACTACCACTCGTTAGAGAAAGAGAAGAAGAGAAAGAGGAAGAGTGGGT
GGGCTGGAAGAATATCCTAGAATGTGTTATTGCCCCTGTTCATGAGGTACGCAATGAAAATTAAATTGCACCCCAAA
TATGGCTGGAATGCCACTTCCCTTTTCTTCTCAAGCCCCGGGCTAGCTTTTGAAATGGCATAAAGACTGAGGTGACC
TTCAGGAAGCACTGCAGATATTAATTTTCCATAGATCTGGATCTGGCCCTGCTGCTTCTCAGACAGCATTGGATTTC
CTAAAGGTGCTCAGGAGGATGGTTGTGTAGTCATGGAGGACCCCTGGATCCTTGCCATTCCCCTCAGCTAATGACGG
AGTGCTCCTTCTCCAGTTCCGGGTGAAAAAGTTCTGAATTCTGTGGAGGAGAAGAAAAGTGATTCAGTGATTTCAGA
TAGACTACTGAAAACCTTTAAAGGGGGAAAAGGAAAGCATATGTCAGTTGTTTAAAACCCAATATCTATTTTTTAAC
TGATTGTATAACTCTAAGATCTGATGAAGTATATTTTTTATTGCCATTTTGTCCTTTGATTATATTGGGAAGTTGAC
TAAACTTGAAAAATGTTTTTAAAACTGTGAATAAATGGAAGCTACTTTGACTAGTTTCAGA
The reverse complement of SEQ ID NO: 1 is provided as SEQ ID NO: 2 herein:
(SEQ ID NO: 2)
TCTGAAACTAGTCAAAGTAGCTTCCATTTATTCACAGTTTTAAAAACATTTTTCAAGTTTAGTCAACTTC
CCAATATAATCAAAGGACAAAATGGCAATAAAAAATATACTTCATCAGATCTTAGAGTTATACAATCAGT
TAAAAAATAGATATTGGGTTTTAAACAACTGACATATGCTTTCCTTTTCCCCCTTTAAAGGTTTTCAGTA
GTCTATCTGAAATCACTGAATCACTTTTCTTCTCCTCCACAGAATTCAGAACTTTTTCACCCGGAACTGG
AGAAGGAGCACTCCGTCATTAGCTGAGGGGAATGGCAAGGATCCAGGGGTCCTCCATGACTACACAACCA
TCCTCCTGAGCACCTTTAGGAAATCCAATGCTGTCTGAGAAGCAGCAGGGCCAGATCCAGATCTATGGAA
AATTAATATCTGCAGTGCTTCCTGAAGGTCACCTCAGTCTTTATGCCATTTCAAAAGCTAGCCCGGGGCT
TGAGAAGAAAAGGGAAGTGGCATTCCAGCCATATTTGGGGTGCAATTTAATTTTCATTGCGTACCTCATG
AACAGGGGCAATAACACATTCTAGGATATTCTTCCAGCCCACCCACTCTTCCTCTTTCTCTTCTTCTCTT
TCTCTAACGAGTGGTAGTGACAGGATGCAAGTCTGCGCTCTTGGTAGATAAACGGAGAAGCAGGAGAAAG
AACTATTCCATAATCAGTTAAACGGGGAGTTTTCAGAATCCTGTCTTGTCATTTAAGTGACTTACTGAAG
TCCTACTAAGTTATTGAGACTATATTTCTTTACTTTTTGCACTGGGACATTGAAGCATTGAGACACCAGA
AGTCCAAAAGACGAAAAATGTGAAAATCACAAATTTAAAGAAAATGTAGAGGTCTCAGTTCTGAAACACC
ATGCTTCAAGTGTTGTCATTTTTGAGAACATTTTTAAAAGGCATCTAATATTCCAGGACATACGGTTCCC
ATTACTGGCCCAGCAGGTACACAGGGTCTCCCACTTTGATGGTCCCTGGGTTTTCCAGCACAAAATACTG
CCCAAAGAGTGGTGATTTTCCATATAACTTTCGTTCTGAAGGGTCACACTGGCGATAACTCTTCAGTGTT
TCCAGCGGTTCCTTCCTGCTCATGACACCGGTGTCTGGGTCCACTGTGGTTAAAATGCATCTGGAACAAG
CCATCACCCTTTTCAGTTCCACGTCACCAATAAGAAGCTCATCCCAAGAATCCTTAAAAAAGAAGTCAAA
TCCAAGGAAAGATCCAAAGGGGCATAGTGTTACCTCTGCATAGACATCGCATCCTGAAATTACAATATTG
GGCCTGAAGTTGGTTGCTTTAACTTTCTTCTCTAGCCTGGAGTTGAGATCCGCCAGCGACGCCTCAGAAA
GGATCAAGAATGGGCTGGTGTCTGAGTAAGCAATCTGGTCCTTGGGTCGGAACAAGTCTGCTATTTGATG
AGGACGTCTCGGTCGCATGTGAGGCTCGAAGTGCACCAGGCGGTAGGGCTGTGACTTCAGGAAGCTGGTT
ATCCACTGGGCGGTGGCCTCGCCACAGTCCCTGCCCTCTATCTCCAGGCCGTGCACTCTGCACTTGTGCA
CTGCATTTGTGGTGGGCGTTTTGATAGGCAGTAGTAGGTCCTTTGTGTAGGCTGCACTGAGAGTCAGGGT
GTCACCATCGCAGGTCAGGGAAATCAGGACCAGGCGAGGTTCCTGGCGAGCAGTAACCATGTTTCCCTCC
TGGTTGATCACAAGCCAAAACCTGTCCCGCAGGTTGCCGCTGCGCAGCCCCATGGCCGTGCACTCCGCCT
CGCTCACCGGCACCCCCTTGCAGGATTTCACAGGGTAGATCCAGAGCTGCGCCACTGTGCCCACCTGCTG
CAGCAGCCGCCGGCGCCGCGTGGGCCATGCGCGGCGCCAGGCGACAGCCCCCAGCGCCACCGCGGTCAGG
CCCAGCGCGGCAACCCCGAGCCACCCGGGCCGGGATTGCGCGAGGAGGACAAAGCGCGCCAGCGCGGAGG
AGCCGGCGGCGCCCATGGCTGGCTTCTCCGCGAGGTGGCGGCGGCAAGGCCGGAGCGCGCTGGTCGCCCG
GGGCCGCTGGGGGAAGGTGCGGCCTTTGGCCCCGAGCCCAAAGGCTGGGCAGCTCCTGAACCCTTCCGGG
CCAATCAGAGCAGTGCGTCCTTCTGGGGGGCGGCGCGGGGAGTGGGAGGTGGTGGCTCAGCTTCCACTTG
GTCGGCGCCCCACTGCCTCTGCAACCTTCCGTCGCCTGCGCTGCAGGGCGCTGT
A human MARC1 mRNA may have the sequence of SEQ ID NO: 4000 provided herein.
(SEQ ID NO: 4000)
CTTGCCGCCGCCACCTCGCGGAGAAGCCAGCCATGGGCGCCGCCGGCTCCTCCGCGCTGGCGCGCTTTGT
CCTCCTCGCGCAATCCCGGCCCGGGTGGCTCGGGGTTGCCGCGCTGGGCCTGACCGCGGTGGCGCTGGGG
GCTGTCGCCTGGCGCCGCGCATGGCCCACGCGGCGCCGGCGGCTGCTGCAGCAGGTGGGCACAGTGGCGC
AGCTCTGGATCTACCCTGTGAAATCCTGCAAGGGGGTGCCGGTGAGCGAGGCGGAGTGCACGGCCATGGG
GCTGCGCAGCGGCAACCTGCGGGACAGGTTTTGGCTTGTGATCAACCAGGAGGGAAACATGGTTACTGCT
CGCCAGGAACCTCGCCTGGTCCTGATTTCCCTGACCTGCGATGGTGACACCCTGACTCTCAGTGCAGCCT
ACACAAAGGACCTACTACTGCCTATCAAAACGCCCACCACAAATGCAGTGCACAAGTGCAGAGTGCACGG
CCTGGAGATAGAGGGCAGGGACTGTGGCGAGGCCACCGCCCAGTGGATAACCAGCTTCCTGAAGTCACAG
CCCTACCGCCTGGTGCACTTCGAGCCTCACATGCGACCGAGACGTCCTCATCAAATAGCAGACTTGTTCC
GACCCAAGGACCAGATTGCTTACTCAGACACCAGCCCATTCTTGATCCTTTCTGAGGCGTCGCTGGCGGA
TCTCAACTCCAGGCTAGAGAAGAAAGTTAAAGCAACCAACTTCAGGCCCAATATTGTAATTTCAGGATGC
GATGTCTATGCAGAGGATTCTTGGGATGAGCTTCTTATTGGTGACGTGGAACTGAAAAGGGTGATGGCTT
GTTCCAGATGCATTTTAACCACAGTGGACCCAGACACCGGTGTCATGAGCAGGAAGGAACCGCTGGAAAC
ACTGAAGAGTTATCGCCAGTGTGACCCTTCAGAACGAAAGTTATATGGAAAATCACCACTCTTTGGGCAG
TATTTTGTGCTGGAAAACCCAGGGACCATCAAAGTGGGAGACCCTGTGTACCTGCTGGGCCAGTAATGGG
AACCGTATGTCCTGGAATATTAGATGCCTTTTAAAAATGTTCTCAAAAATGACAACACTTGAAGCATGGT
GTTTCAGAACTGAGACCTCTACATTTTCTTTAAATTTGTGATTTTCACATTTTTCGTCTTTTGGACTTCT
GGTGTCTCAATGCTTCAATGTCCCAGTGCAAAAAGTAAAGAAATATAGTCTCAATAACTTAGTAGGACTT
CAGTAAGTCACTTAAATGACAAGACAGGATTCTGAAAACTCCCCGTTTAACTGATTATGGAATAGTTCTT
TCTCCTGCTTCTCCGTTTATCTACCAAGAGCGCAGACTTGCATCCTGTCACTACCACTCGTTAGAGAAAG
AGAAGAAGAGAAAGAGGAAGAGTGGGTGGGCTGGAAGAATATCCTAGAATGTGTTATTGCCCCTGTTCAT
GAGGTACGCAATGAAAATTAAATTGCACCCCAAATATGGCTGGAATGCCACTTCCCTTTTCTTCTCAAGC
CCCGGGCTAGCTTTTGAAATGGCATAAAGACTGAGGTGACCTTCAGGAAGCACTGCAGATATTAATTTTC
CATAGATCTGGATCTGGCCCTGCTGCTTCTCAGACAGCATTGGATTTCCTAAAGGTGCTCAGGAGGATGG
TTGTGTAGTCATGGAGGACCCCTGGATCCTTGCCATTCCCCTCAGCTAATGACGGAGTGCTCCTTCTCCA
GTTCCGGGTGAAAAAGTTCTGAATTCTGTGGAGGAGAAGAAAAGTGATTCAGTGATTTCAGATAGACTAC
TGAAAACCTTTAAAGGGGGAAAAGGAAAGCATATGTCAGTTGTTTAAAACCCAATATCTATTTTTTAACT
GATTGTATAACTCTAAGATCTGATGAAGTATATTTTTTATTGCCATTTTGTCCTTTGATTATATTGGGAA
GTTGACTAAACTTGAAAAATGTTTTTAAAACTGTGAATAAATGGAAGCTACTTTGACTAGTTTCAGATCT
TACTAACTTCTTGGCACAAAGTTAGACTGTGAAAGCTGACTGAGGCTGGGCACAGGGGCTCATGCCTGTA
ATTCCAGCACTTTGGGAGGCCAAGGTGGGAGAATGGCTTGAGCCCAGGAGTTTGAGACCAGCCCAGAAAA
TATAATGGGATCCTGTCGCTACAAAATGTTTTTAAAATGCACTCGGTGTGGTGGTGTGTGCCTGCAGTCC
TGGCTATGGCTACTCGGGAGGATGAGGTAGAAGGATTGGTTGAGCCCAGGAGCGGGAGATTGAGGCTGCA
GTGAGTTATGATTGCACCACTACACTCCAGCCTGAGTGATAGAGTGAGACCCTATCTCTAAAAAAGAAAC
AGGAAAAAAAAAGAAAGCTGACTGAGGTGAATGGGCAAAGCCAGTAATTCTGACACCTGACCACAGCTGG
GTCTTCTGCATAATGGACCTCCTCACCCACAGCCTCCCAGGCAAGCACCCATGTTTGAAGGACTATCAAG
TCAACATGCTTTTTACCAAAAGCTGCACATTTTTCACTTTGATTTTATAAAAGAGGTCAGTAATCGCTGA
AATCTAGCTGAGCCCTGAAGTAAAGTTCTGAGCAAAGAGGTGCATGTGCTTGTTTTATGGTTGGTGAATT
ATTACAGTTTGTTTTCTGCATGCTTGGCATGAGGTGAATAATTACATCAATTTTCCAGAGAACCTGGGCC
ATCACCTTCCCCAACAAGTCCAGTTGATGTTGAAACTACAGATAGATTGAGACAAAGCGAAGTGTTCAGC
AAGTAGCATTACTAATGGGACCGGGGGACCCGTGGGAGAGTGAGTGTACACAGGATTTAGGAAACCATGT
GAATATGGGCTCTCTGGGAATAGCCAATAGGTAGGGAGCAATCAGAAACCCAAGGTTTGGTGGCTCTTCC
TAGGTATTTATAATTAGTGGCAAGTGAAAGCCTTAGTCCTGAATTTCTAACCACTTGTAAGAACTAACAG
CCACTTCTCTGTGCCCCGTCCGGGCAGTAACCATCATTCTCCATGGACAGGCTCTCGGGGTAGCTAGCTC
TGCAGGGCAGCACCCACGTGGAAGGGAGCACCCAGAAACCCTCCTCACTGGGCAGACCTGTCCTTCTGTG
CCTCACAGTGTGAGGAAGATTCCTGTTTGAAGAGAGAAGTTCCAGTGACCTCTAGAATCTCAGAGTAGTT
GCCAAGCTTTCTGTCAGTGAGATTTAAAGGCCATTTACTTGTGTTTATTTTATATTTAATGAGTTGGTTA
ATGCCAGAGACAAAGCTGATATCCCATTTATTTTGGATACTGAGCATTTGCACACTATTCCACTTGAAAT
ATAGAATCAGGAATGTAGGCCATCCCAGACTTTCAGATCTTACAACAGCAAATGACAGATGTTTGAGATC
AGGCCAAAATATCCACCCTCGGTGGGCATCTCCTCTGTGTGGCAACTTATGCTGCAGCCACAGTGGGGAG
TCACAAACTCAGAGCTGGAGGTCTTGAAAAGGACAATGTGGGCCAGGCTCCGGAGGGGCTGCCTAAAGGC
TTGCTTTTGTGACTCTCCTGCAGAAAATGTTAGAAACTTCCAACCGAAAGACGAGGGCAGCAACTTATAC
ACACGAAGGCAGAAAGAAATTGGGGAAGGGGAGGCTGTTGGAATTCAGGCCGTTGTCCTATAGGGAGAAA
TACTCCTCCTCTCCTTCTCCCTTTACTGATAACGGGGCATGGTGAGGAGATGAGCTTGTGAGGGTCTGCC
AGTTTGGTAAGAGTGCATGGGGAGGTTGGGTAAATTAGACTAGCCAAATGGGACTTCGGGAAACCATTTA
TGAGGCTGTCACCAACAGTGATGGCAGGCTGAAATTCCAGGCAAGTGCTCCCAGCATTCCAAGAGTGTAT
CAAATTAAAGCAACCCATGATGGTGGAGAACAGATACATTAAAGTTCCTTGAAAATGACAGAGTGGCTCT
CAGACCAGACCTTGATTGTGGGTATAATCGGAGTGTTGCTACCACACCCTAACACTGCATTTCCCGTGTT
TTATTGGTCCATGGAATTCTGAAAGTTTGCCTTTCGGGATGCTTCTAAAAACAATTCCATGGACCAGTAA
GTTTGGAAAGTCCTGCGTGCCTCACTTCTCTTCAAAGGCAAAAGGCTCTGGAGAGGCCTTCATGAAGACA
TCTGTGTTTAATGCTGCCCTTCCCAAAGGTCTGTTTTTGACTGTCTTTTGAGAAATGATCCTCTGATCTC
TAGGCAGAATGCCAGTGAGCCAAGGAATCCCAGTTAGCAGGAGGGGTGCACTCATGGGAAGACTGAAGAA
GTTAAAAGTTCCCGCCAAGTGAAGGAGACCTATCTTGGGACACTTCCCCTTGTCCTCTCCCTTGCCCCTC
TTGCTGGAGTAAAAGGATGGAACTGGGACTTGATAGGTTAAAGGAGGTGTGGAGAAGTGTCTTAGACCAG
CTCTCCTGTTGTGGGCCTTAGGGAGAAGCACTCTCTTTCTTCGGGATCATTTTCCAAACATGCATTTTTG
GATGGATAGGGTGGATCAGGGTGAGGGAAGGGAAACCAAACTCTCTCTAACCTTGCCCTTACAGCAATAC
CTGTGATGTAAGTTACAAAACCACCTGTGATGAAAGTGCTCCAGGATGCTTCATGCACCAGGGAGGGGTG
CCCTGTTTCTCTTCTGCTAGCTTCTCCTTTCTTTTTTTTTTTTCTTCTTTTTTTTGAGACAGTGTCTCAC
TCTGTTGCCAGGCTGGAGTGCAGTGGTGAGATCTCAGCTCACTGCAGCCTCTGCCTCCCAGGTTCAAGCA
ATTCTTCTGCCTCAGCCTCCCGAGTAGCTGGTGTGTCTGGAGTTGGTTCCTTCTGGTGGGTTCTTGGTCT
CGCTGACTTCAAGAATGAAGCCACAGACCTTCGCAGTGAGTGTTACAGCTCTTAAAGGTGGCACGGACCC
AAAGTGAGCAGTAGCAAGATTTATTGTGGAGAGCGAAAGAACAAAGCTTCGGAAGGGGACCCAAATGGGC
TGCTGCTGCTGGCTGGGGTGGCCACCTTTTATTCCCTTATTTGTCCCTGCCCATGTCCTGCTGATTGCTC
CATTTTACAGAGTGCTGATTGGTCCATTTTACAGAGTGCTGATTGGTGCATTTACAATCCTTTAGCTAGA
CACAGAGTGCCGATTGGTGAGTTTTTACAGTGCTGATTGGTGCATTTACAATCCTTTAGCTAGACACAGA
ACACTGACTGGTGCATTTATAATCCTCTAGCTAGAAAGAAAAGTTCTCCAAGTCCCCACTAGACCCAGGA
AGTCCAGCTGGCTTCACCTCTCACTGGGACTACAGGTGCACACCACCACACCCAGCTAATTTTTGTATTT
TTAGTAGAGACGGGGTTTCACCATGTTGTTCAGGATGGTCTCGAACTCTTGATCTCGTGATCTGCCCGCC
TCGGCCTCCCAAAGTGCTGGGATTACAGTTGTGAGCCACCACGCCCGGCCCTAGCTTTTCCTTTCTGTTG
CAAGTCCTCTCAACTAGTGTTGCCTTCCACCCTACAAAGCAGAATTACCTCAGAAGTCCTATGGCCCTGA
CTCTATCTATGTCTGCACAAAGCACTACTGTGCTTTGCTGTCTGCAAGAACAGAGATTGTTTGCTTCAAC
CACTTTCTCTGAATGGATGAATGAGTTATGATGATATCTAAAGTTACCCAATTTCAAGCAAGAGGAAGAA
TCTGGCTCGGTACCACAGATGTTCTTGGAATTGGGATAGTAAAAAAGTCCCTGAGGCATCCCTTGGTCTG
CTCTGACCACACTCTCTTCACAGGAAGAGGCTTGGGCCACAGCTCTGACTATAACTCTGCTCTTCCTCCA
AACACAGCTGAGGAATTGGGTGGTGGGGCACCTGCTCCCATGCTCTGTGGCCTGGCTCAGAGAGAAGAGT
TGCCTTAATTACATTATTATTCTTCCTGGACAGGCTGTAGGTTGTGTAAAGTAACAAAAAGGACTGAGAA
GTGACTTCCCATTCAGCCTCTTCCAAGGCCATTTTTGATAGGCAGGTCAAATTCACTCACATTTGGTTAT
TTGTTGGCCAGTCTAGTGCATTCACCCTTGCTGGTCCTCAGTCATGCTCCTTTACCTTTACAGAGCATCC
TAGACTGCTCTTCCTCTTACCTTCCTTGTGAAACCCACAACCCCTAGTCCCTCCCCTTCCCTGGCATTTG
TTATGCCCTCTACCAATCCCTGACCTGGTATTGGTCAGTCTCCAATCCTGGTGGATCCCTGTGGGAACTA
AGTTAAGTCTAACTTTTGTCTCCCTCTTTAGAATTTACTGGGAGTACTGTAAATAAACTATTGTTGTTAT
AATTATTTCTGATTAACATTTTTACACCTAACAAAGTCTCAGAGAGATTGAATTTACTGGGTTGAAGGGA
GGAGCACCTTCCACATGACCTGCCCAGCAATTAAAGCCGCTTGTTAGTCCGAGGCCCAGGACGGCCGAGG
ACAGCTGGAGAGCTCTTCGTTGCAGGCAGCTCTGGTTAACATCAACCGGGAAAGCTCTTTGTAAACACAT
GAATAATTGATCGTCCAGCGCTCACATAGCTACCGCGGATCTGAGCCCGTATGACTCATTTGCGAGCCAT
TCCTGTCGTCTGGATGCCATAACATTGGAGGAATGATGATCGTTTCTTGGAGGTTCTTCTGTGGCCAGAG
TTGCCAAGACCAAGGCTGTAATGGTTTGTTATGATGACCTTTGTTATTCCATTAGGCTCAATTGCTTTAA
AAAATGATGTGTGCATACTTTAGGAACGTTTTTACCCTTTATGTTGACCTGACATCATAGTTTATATTAT
AAAATGTATTAATGACAGAAGAGTGTTTTCATGTCCCAAGGACAAATTTTAACAACCATAATCTGCCCTC
AGTCATCATAAATATAAATGTATTGGTCAAACAGATCTCGTTAATGTGGCCAAGATAAATGCAAGTCTAT
ATTTTAAGGCAGTCGAAGTCCTAGAGAATATATCTGGAGCTTTTGTGGGGCTAAGAGATCTTGTATATAT
GCTATCAAAAGGCTGAGAAAATTAACATGTTCCCCCCTCTGATTTTGCATTGGACAGATATAAATGTCTT
GGGGATGTCAAGTAAGATTGTTCACATAGTTTCTGGACACCATTAATGCCTGATGGGGTGAATCTTAGTT
CTTAAAGCTATATTCTGCTCATTATGCTCACAGGGCTTTTGAAAAGAGAACAAAATAAAGATTTCAAGTC
TTAGCAA
The reverse complement of SEQ ID NO: 4000, is provided as SEQ ID NO: 4001 herein.
(SEQ ID NO: 4001)
TTGCTAAGACTTGAAATCTTTATTTTGTTCTCTTTTCAAAAGCCCTGTGAGCATAATGAGCAGAATATAG
CTTTAAGAACTAAGATTCACCCCATCAGGCATTAATGGTGTCCAGAAACTATGTGAACAATCTTACTTGA
CATCCCCAAGACATTTATATCTGTCCAATGCAAAATCAGAGGGGGGAACATGTTAATTTTCTCAGCCTTT
TGATAGCATATATACAAGATCTCTTAGCCCCACAAAAGCTCCAGATATATTCTCTAGGACTTCGACTGCC
TTAAAATATAGACTTGCATTTATCTTGGCCACATTAACGAGATCTGTTTGACCAATACATTTATATTTAT
GATGACTGAGGGCAGATTATGGTTGTTAAAATTTGTCCTTGGGACATGAAAACACTCTTCTGTCATTAAT
ACATTTTATAATATAAACTATGATGTCAGGTCAACATAAAGGGTAAAAACGTTCCTAAAGTATGCACACA
TCATTTTTTAAAGCAATTGAGCCTAATGGAATAACAAAGGTCATCATAACAAACCATTACAGCCTTGGTC
TTGGCAACTCTGGCCACAGAAGAACCTCCAAGAAACGATCATCATTCCTCCAATGTTATGGCATCCAGAC
GACAGGAATGGCTCGCAAATGAGTCATACGGGCTCAGATCCGCGGTAGCTATGTGAGCGCTGGACGATCA
ATTATTCATGTGTTTACAAAGAGCTTTCCCGGTTGATGTTAACCAGAGCTGCCTGCAACGAAGAGCTCTC
CAGCTGTCCTCGGCCGTCCTGGGCCTCGGACTAACAAGCGGCTTTAATTGCTGGGCAGGTCATGTGGAAG
GTGCTCCTCCCTTCAACCCAGTAAATTCAATCTCTCTGAGACTTTGTTAGGTGTAAAAATGTTAATCAGA
AATAATTATAACAACAATAGTTTATTTACAGTACTCCCAGTAAATTCTAAAGAGGGAGACAAAAGTTAGA
CTTAACTTAGTTCCCACAGGGATCCACCAGGATTGGAGACTGACCAATACCAGGTCAGGGATTGGTAGAG
GGCATAACAAATGCCAGGGAAGGGGAGGGACTAGGGGTTGTGGGTTTCACAAGGAAGGTAAGAGGAAGAG
CAGTCTAGGATGCTCTGTAAAGGTAAAGGAGCATGACTGAGGACCAGCAAGGGTGAATGCACTAGACTGG
CCAACAAATAACCAAATGTGAGTGAATTTGACCTGCCTATCAAAAATGGCCTTGGAAGAGGCTGAATGGG
AAGTCACTTCTCAGTCCTTTTTGTTACTTTACACAACCTACAGCCTGTCCAGGAAGAATAATAATGTAAT
TAAGGCAACTCTTCTCTCTGAGCCAGGCCACAGAGCATGGGAGCAGGTGCCCCACCACCCAATTCCTCAG
CTGTGTTTGGAGGAAGAGCAGAGTTATAGTCAGAGCTGTGGCCCAAGCCTCTTCCTGTGAAGAGAGTGTG
GTCAGAGCAGACCAAGGGATGCCTCAGGGACTTTTTTACTATCCCAATTCCAAGAACATCTGTGGTACCG
AGCCAGATTCTTCCTCTTGCTTGAAATTGGGTAACTTTAGATATCATCATAACTCATTCATCCATTCAGA
GAAAGTGGTTGAAGCAAACAATCTCTGTTCTTGCAGACAGCAAAGCACAGTAGTGCTTTGTGCAGACATA
GATAGAGTCAGGGCCATAGGACTTCTGAGGTAATTCTGCTTTGTAGGGTGGAAGGCAACACTAGTTGAGA
GGACTTGCAACAGAAAGGAAAAGCTAGGGCCGGGCGTGGTGGCTCACAACTGTAATCCCAGCACTTTGGG
AGGCCGAGGCGGGCAGATCACGAGATCAAGAGTTCGAGACCATCCTGAACAACATGGTGAAACCCCGTCT
CTACTAAAAATACAAAAATTAGCTGGGTGTGGTGGTGTGCACCTGTAGTCCCAGTGAGAGGTGAAGCCAG
CTGGACTTCCTGGGTCTAGTGGGGACTTGGAGAACTTTTCTTTCTAGCTAGAGGATTATAAATGCACCAG
TCAGTGTTCTGTGTCTAGCTAAAGGATTGTAAATGCACCAATCAGCACTGTAAAAACTCACCAATCGGCA
CTCTGTGTCTAGCTAAAGGATTGTAAATGCACCAATCAGCACTCTGTAAAATGGACCAATCAGCACTCTG
TAAAATGGAGCAATCAGCAGGACATGGGCAGGGACAAATAAGGGAATAAAAGGTGGCCACCCCAGCCAGC
AGCAGCAGCCCATTTGGGTCCCCTTCCGAAGCTTTGTTCTTTCGCTCTCCACAATAAATCTTGCTACTGC
TCACTTTGGGTCCGTGCCACCTTTAAGAGCTGTAACACTCACTGCGAAGGTCTGTGGCTTCATTCTTGAA
GTCAGCGAGACCAAGAACCCACCAGAAGGAACCAACTCCAGACACACCAGCTACTCGGGAGGCTGAGGCA
GAAGAATTGCTTGAACCTGGGAGGCAGAGGCTGCAGTGAGCTGAGATCTCACCACTGCACTCCAGCCTGG
CAACAGAGTGAGACACTGTCTCAAAAAAAAGAAGAAAAAAAAAAAAGAAAGGAGAAGCTAGCAGAAGAGA
AACAGGGCACCCCTCCCTGGTGCATGAAGCATCCTGGAGCACTTTCATCACAGGTGGTTTTGTAACTTAC
ATCACAGGTATTGCTGTAAGGGCAAGGTTAGAGAGAGTTTGGTTTCCCTTCCCTCACCCTGATCCACCCT
ATCCATCCAAAAATGCATGTTTGGAAAATGATCCCGAAGAAAGAGAGTGCTTCTCCCTAAGGCCCACAAC
AGGAGAGCTGGTCTAAGACACTTCTCCACACCTCCTTTAACCTATCAAGTCCCAGTTCCATCCTTTTACT
CCAGCAAGAGGGGCAAGGGAGAGGACAAGGGGAAGTGTCCCAAGATAGGTCTCCTTCACTTGGCGGGAAC
TTTTAACTTCTTCAGTCTTCCCATGAGTGCACCCCTCCTGCTAACTGGGATTCCTTGGCTCACTGGCATT
CTGCCTAGAGATCAGAGGATCATTTCTCAAAAGACAGTCAAAAACAGACCTTTGGGAAGGGCAGCATTAA
ACACAGATGTCTTCATGAAGGCCTCTCCAGAGCCTTTTGCCTTTGAAGAGAAGTGAGGCACGCAGGACTT
TCCAAACTTACTGGTCCATGGAATTGTTTTTAGAAGCATCCCGAAAGGCAAACTTTCAGAATTCCATGGA
CCAATAAAACACGGGAAATGCAGTGTTAGGGTGTGGTAGCAACACTCCGATTATACCCACAATCAAGGTC
TGGTCTGAGAGCCACTCTGTCATTTTCAAGGAACTTTAATGTATCTGTTCTCCACCATCATGGGTTGCTT
TAATTTGATACACTCTTGGAATGCTGGGAGCACTTGCCTGGAATTTCAGCCTGCCATCACTGTTGGTGAC
AGCCTCATAAATGGTTTCCCGAAGTCCCATTTGGCTAGTCTAATTTACCCAACCTCCCCATGCACTCTTA
CCAAACTGGCAGACCCTCACAAGCTCATCTCCTCACCATGCCCCGTTATCAGTAAAGGGAGAAGGAGAGG
AGGAGTATTTCTCCCTATAGGACAACGGCCTGAATTCCAACAGCCTCCCCTTCCCCAATTTCTTTCTGCC
TTCGTGTGTATAAGTTGCTGCCCTCGTCTTTCGGTTGGAAGTTTCTAACATTTTCTGCAGGAGAGTCACA
AAAGCAAGCCTTTAGGCAGCCCCTCCGGAGCCTGGCCCACATTGTCCTTTTCAAGACCTCCAGCTCTGAG
TTTGTGACTCCCCACTGTGGCTGCAGCATAAGTTGCCACACAGAGGAGATGCCCACCGAGGGTGGATATT
TTGGCCTGATCTCAAACATCTGTCATTTGCTGTTGTAAGATCTGAAAGTCTGGGATGGCCTACATTCCTG
ATTCTATATTTCAAGTGGAATAGTGTGCAAATGCTCAGTATCCAAAATAAATGGGATATCAGCTTTGTCT
CTGGCATTAACCAACTCATTAAATATAAAATAAACACAAGTAAATGGCCTTTAAATCTCACTGACAGAAA
GCTTGGCAACTACTCTGAGATTCTAGAGGTCACTGGAACTTCTCTCTTCAAACAGGAATCTTCCTCACAC
TGTGAGGCACAGAAGGACAGGTCTGCCCAGTGAGGAGGGTTTCTGGGTGCTCCCTTCCACGTGGGTGCTG
CCCTGCAGAGCTAGCTACCCCGAGAGCCTGTCCATGGAGAATGATGGTTACTGCCCGGACGGGGCACAGA
GAAGTGGCTGTTAGTTCTTACAAGTGGTTAGAAATTCAGGACTAAGGCTTTCACTTGCCACTAATTATAA
ATACCTAGGAAGAGCCACCAAACCTTGGGTTTCTGATTGCTCCCTACCTATTGGCTATTCCCAGAGAGCC
CATATTCACATGGTTTCCTAAATCCTGTGTACACTCACTCTCCCACGGGTCCCCCGGTCCCATTAGTAAT
GCTACTTGCTGAACACTTCGCTTTGTCTCAATCTATCTGTAGTTTCAACATCAACTGGACTTGTTGGGGA
AGGTGATGGCCCAGGTTCTCTGGAAAATTGATGTAATTATTCACCTCATGCCAAGCATGCAGAAAACAAA
CTGTAATAATTCACCAACCATAAAACAAGCACATGCACCTCTTTGCTCAGAACTTTACTTCAGGGCTCAG
CTAGATTTCAGCGATTACTGACCTCTTTTATAAAATCAAAGTGAAAAATGTGCAGCTTTTGGTAAAAAGC
ATGTTGACTTGATAGTCCTTCAAACATGGGTGCTTGCCTGGGAGGCTGTGGGTGAGGAGGTCCATTATGC
AGAAGACCCAGCTGTGGTCAGGTGTCAGAATTACTGGCTTTGCCCATTCACCTCAGTCAGCTTTCTTTTT
TTTTCCTGTTTCTTTTTTAGAGATAGGGTCTCACTCTATCACTCAGGCTGGAGTGTAGTGGTGCAATCAT
AACTCACTGCAGCCTCAATCTCCCGCTCCTGGGCTCAACCAATCCTTCTACCTCATCCTCCCGAGTAGCC
ATAGCCAGGACTGCAGGCACACACCACCACACCGAGTGCATTTTAAAAACATTTTGTAGCGACAGGATCC
CATTATATTTTCTGGGCTGGTCTCAAACTCCTGGGCTCAAGCCATTCTCCCACCTTGGCCTCCCAAAGTG
CTGGAATTACAGGCATGAGCCCCTGTGCCCAGCCTCAGTCAGCTTTCACAGTCTAACTTTGTGCCAAGAA
GTTAGTAAGATCTGAAACTAGTCAAAGTAGCTTCCATTTATTCACAGTTTTAAAAACATTTTTCAAGTTT
AGTCAACTTCCCAATATAATCAAAGGACAAAATGGCAATAAAAAATATACTTCATCAGATCTTAGAGTTA
TACAATCAGTTAAAAAATAGATATTGGGTTTTAAACAACTGACATATGCTTTCCTTTTCCCCCTTTAAAG
GTTTTCAGTAGTCTATCTGAAATCACTGAATCACTTTTCTTCTCCTCCACAGAATTCAGAACTTTTTCAC
CCGGAACTGGAGAAGGAGCACTCCGTCATTAGCTGAGGGGAATGGCAAGGATCCAGGGGTCCTCCATGAC
TACACAACCATCCTCCTGAGCACCTTTAGGAAATCCAATGCTGTCTGAGAAGCAGCAGGGCCAGATCCAG
ATCTATGGAAAATTAATATCTGCAGTGCTTCCTGAAGGTCACCTCAGTCTTTATGCCATTTCAAAAGCTA
GCCCGGGGCTTGAGAAGAAAAGGGAAGTGGCATTCCAGCCATATTTGGGGTGCAATTTAATTTTCATTGC
GTACCTCATGAACAGGGGCAATAACACATTCTAGGATATTCTTCCAGCCCACCCACTCTTCCTCTTTCTC
TTCTTCTCTTTCTCTAACGAGTGGTAGTGACAGGATGCAAGTCTGCGCTCTTGGTAGATAAACGGAGAAG
CAGGAGAAAGAACTATTCCATAATCAGTTAAACGGGGAGTTTTCAGAATCCTGTCTTGTCATTTAAGTGA
CTTACTGAAGTCCTACTAAGTTATTGAGACTATATTTCTTTACTTTTTGCACTGGGACATTGAAGCATTG
AGACACCAGAAGTCCAAAAGACGAAAAATGTGAAAATCACAAATTTAAAGAAAATGTAGAGGTCTCAGTT
CTGAAACACCATGCTTCAAGTGTTGTCATTTTTGAGAACATTTTTAAAAGGCATCTAATATTCCAGGACA
TACGGTTCCCATTACTGGCCCAGCAGGTACACAGGGTCTCCCACTTTGATGGTCCCTGGGTTTTCCAGCA
CAAAATACTGCCCAAAGAGTGGTGATTTTCCATATAACTTTCGTTCTGAAGGGTCACACTGGCGATAACT
CTTCAGTGTTTCCAGCGGTTCCTTCCTGCTCATGACACCGGTGTCTGGGTCCACTGTGGTTAAAATGCAT
CTGGAACAAGCCATCACCCTTTTCAGTTCCACGTCACCAATAAGAAGCTCATCCCAAGAATCCTCTGCAT
AGACATCGCATCCTGAAATTACAATATTGGGCCTGAAGTTGGTTGCTTTAACTTTCTTCTCTAGCCTGGA
GTTGAGATCCGCCAGCGACGCCTCAGAAAGGATCAAGAATGGGCTGGTGTCTGAGTAAGCAATCTGGTCC
TTGGGTCGGAACAAGTCTGCTATTTGATGAGGACGTCTCGGTCGCATGTGAGGCTCGAAGTGCACCAGGC
GGTAGGGCTGTGACTTCAGGAAGCTGGTTATCCACTGGGCGGTGGCCTCGCCACAGTCCCTGCCCTCTAT
CTCCAGGCCGTGCACTCTGCACTTGTGCACTGCATTTGTGGTGGGCGTTTTGATAGGCAGTAGTAGGTCC
TTTGTGTAGGCTGCACTGAGAGTCAGGGTGTCACCATCGCAGGTCAGGGAAATCAGGACCAGGCGAGGTT
CCTGGCGAGCAGTAACCATGTTTCCCTCCTGGTTGATCACAAGCCAAAACCTGTCCCGCAGGTTGCCGCT
GCGCAGCCCCATGGCCGTGCACTCCGCCTCGCTCACCGGCACCCCCTTGCAGGATTTCACAGGGTAGATC
CAGAGCTGCGCCACTGTGCCCACCTGCTGCAGCAGCCGCCGGCGCCGCGTGGGCCATGCGCGGCGCCAGG
CGACAGCCCCCAGCGCCACCGCGGTCAGGCCCAGCGCGGCAACCCCGAGCCACCCGGGCCGGGATTGCGC
GAGGAGGACAAAGCGCGCCAGCGCGGAGGAGCCGGCGGCGCCCATGGCTGGCTTCTCCGCGAGGTGGCGG
CGGCAAG
A human MARC1 mRNA may have the sequence of SEQ ID NO: 4003 provided herein.
(SEQ ID NO: 4003)
TTCTCTGTTGATGGACACTCGGGCTGTTACTACTTTTTCAGCATTTTGATTAAAGCTGCAATAAACATTGATACACA
AATGTCTGTTTGAGTTCCTGTTTTCAGTTCTTTGGGGTCTATACGTAGGAGTGTGCTAGGTATTTTATGTTTTATAT
ATATTTTACTGCAATTAAAAAATAAATATATAAAAGACTGGCCTGTGTGAAGACCTCGGGAGGTAAGAATGGCTGGA
GCAACAGCTGGATCATGAAGGGCTGGGCACGCCCTTGTTTAGGAGTTGGTTTTATCCTGAAAGCAGGAACCATGGAG
GGATTTTGAATGAGGGGGTCATAAAGTTAGATTTGCATTTTAGAGCGATGTAAACTGCCATTACCAGGAAGAATATT
AGACAGAATATTCACCTGCTAGTCCCAAGGATTTGGGTCAGGGCAGGCCTCTGTCTGTGCAGAAACAAAGTCTGGTA
AAAGGGCAGTTACGGAAAGGGCTTATACTAAGCATATTTTTCTAGTGTAGCTGAACAACTCAACCATGATAACCTGC
TGGAAGTGATGCAAGAAATATCTTGAACGACCTAAAGTACCGGCCATATTTTTTTCTTATGTCTGGAAATCTCAAAA
GCACATGCTCACTTCTATAATTGTAATCATTTGATCAGTGTGTACTGTAAGGATTGAAATGCCAATATGTTTTGCTT
CCTTGGTAGCTGAGAGATAACCTGCAAAAACATGTTGTTCTTGTTCTGGAAATGGCTCTTTCTATTACCTTTATTTC
TCCATTTATCTTTTTTTCTAGGAAGTACCTGTAGACCAGGAATACTGGGCCAGAAGAAAAAAATACTGTCTAGTTTA
GCAAATTGCAGAATGGACAGCACTGAATGTTGGAACATAAAATTTTTAAAAGGTTTTGGCTTGTGATCAACCAGGAG
GGAAACATGGTTACTGCTCGCCAGGAACCTCGCCTGGTCCTGATTTCCCTGACCTGCGATGGTGACACCCTGACTCT
CAGTGCAGCCTACACAAAGGACCTACTACTGCCTATCAAAACGCCCACCACAAATGCAGTGCACAAGTGCAGAGTGC
ACGGCCTGGAGATAGAGGGCAGGGACTGTGGCGAGGCCACCGCCCAGTGGATAACCAGCTTCCTGAAGTCACAGCCC
TACCGCCTGGTGCACTTCGAGCCTCACATGCGACCGAGACGTCCTCATCAAATAGCAGACTTGTTCCGACCCAAGGA
CCAGATTGCTTACTCAGACACCAGCCCATTCTTGATCCTTTCTGAGGCGTCGCTGGCGGATCTCAACTCCAGGCTAG
AGAAGAAAGTTAAAGCAACCAACTTCAGGCCCAATATTGTAATTTCAGGATGCGATGTCTATGCAGAGGTAACACTA
TGCCCCTTTGGATCTTTCCTTGGATTTGACTTCTTTTTTAAGGATTCTTGGGATGAGCTTCTTATTGGTGACGTGGA
ACTGAAAAGGGTGATGGCTTGTTCCAGATGCATTTTAACCACAGTGGACCCAGACACCGGTGTCATGAGCAGGAAGG
AACCGCTGGAAACACTGAAGAGTTATCGCCAGTGTGACCCTTCAGAACGAAAGTTATATGGAAAATCACCACTCTTT
GGGCAGTATTTTGTGCTGGAAAACCCAGGGACCATCAAAGTGGGAGACCCTGTGTACCTGCTGGGCCAGTAATGGGA
ACCGTATGTCCTGGAATATTAGATGCCTTTTAAAAATGTTCTCAAAAATGACAACACTTGAAGCATGGTGTTTCAGA
ACTGAGACCTCTACATTTTCTTTAAATTTGTGATTTTCACATTTTTCGTCTTTTGGACTTCTGGTGTCTCAATGCTT
CAATGTCCCAGTGCAAAAAGTAAAGAAATATAGTCTCAATAACTTAGTAGGACTTCAGTAAGTCACTTAAATGACAA
GACAGGATTCTGAAAACTCCCCGTTTAACTGATTATGGAATAGTTCTTTCTCCTGCTTCTCCGTTTATCTACCAAGA
GCGCAGACTTGCATCCTGTCACTACCACTCGTTAGAGAAAGAGAAGAAGAGAAAGAGGAAGAGTGGGTGGGCTGGAA
GAATATCCTAGAATGTGTTATTGCCCCTGTTCATGAGGTACGCAATGAAAATTAAATTGCACCCCAAATATGGCTGG
AATGCCACTTCCCTTTTCTTCTCAAGCCCCGGGCTAGCTTTTGAAATGGCATAAAGACTGAGGTGACCTTCAGGAAG
CACTGCAGATATTAATTTTCCATAGATCTGGATCTGGCCCTGCTGCTTCTCAGACAGCATTGGATTTCCTAAAGGTG
CTCAGGAGGATGGTTGTGTAGTCATGGAGGACCCCTGGATCCTTGCCATTCCCCTCAGCTAATGACGGAGTGCTCCT
TCTCCAGTTCCGGGTGAAAAAGTTCTGAATTCTGTGGAGGAGAAGAAAAGTGATTCAGTGATTTCAGATAGACTACT
GAAAACCTTTAAAGGGGGAAAAGGAAAGCATATGTCAGTTGTTTAAAACCCAATATCTATTTTTTAACTGATTGTAT
AACTCTAAGATCTGATGAAGTATATTTTTTATTGCCATTTTGTCCTTTGATTATATTGGGAAGTTGACTAAACTTGA
AAAATGTTTTTAAAACTGTGAATAAATGGAAGCTACTTTGACTAGTTTCAGA.
The reverse complement of SEQ ID NO: 4003 is provided as SEQ ID NO: 4004 herein.
(SEQ ID NO: 4004)
TCTGAAACTAGTCAAAGTAGCTTCCATTTATTCACAGTTTTAAAAACATTTTTCAAGTTTAGTCAACTTC
CCAATATAATCAAAGGACAAAATGGCAATAAAAAATATACTTCATCAGATCTTAGAGTTATACAATCAGT
TAAAAAATAGATATTGGGTTTTAAACAACTGACATATGCTTTCCTTTTCCCCCTTTAAAGGTTTTCAGTA
GTCTATCTGAAATCACTGAATCACTTTTCTTCTCCTCCACAGAATTCAGAACTTTTTCACCCGGAACTGG
AGAAGGAGCACTCCGTCATTAGCTGAGGGGAATGGCAAGGATCCAGGGGTCCTCCATGACTACACAACCA
TCCTCCTGAGCACCTTTAGGAAATCCAATGCTGTCTGAGAAGCAGCAGGGCCAGATCCAGATCTATGGAA
AATTAATATCTGCAGTGCTTCCTGAAGGTCACCTCAGTCTTTATGCCATTTCAAAAGCTAGCCCGGGGCT
TGAGAAGAAAAGGGAAGTGGCATTCCAGCCATATTTGGGGTGCAATTTAATTTTCATTGCGTACCTCATG
AACAGGGGCAATAACACATTCTAGGATATTCTTCCAGCCCACCCACTCTTCCTCTTTCTCTTCTTCTCTT
TCTCTAACGAGTGGTAGTGACAGGATGCAAGTCTGCGCTCTTGGTAGATAAACGGAGAAGCAGGAGAAAG
AACTATTCCATAATCAGTTAAACGGGGAGTTTTCAGAATCCTGTCTTGTCATTTAAGTGACTTACTGAAG
TCCTACTAAGTTATTGAGACTATATTTCTTTACTTTTTGCACTGGGACATTGAAGCATTGAGACACCAGA
AGTCCAAAAGACGAAAAATGTGAAAATCACAAATTTAAAGAAAATGTAGAGGTCTCAGTTCTGAAACACC
ATGCTTCAAGTGTTGTCATTTTTGAGAACATTTTTAAAAGGCATCTAATATTCCAGGACATACGGTTCCC
ATTACTGGCCCAGCAGGTACACAGGGTCTCCCACTTTGATGGTCCCTGGGTTTTCCAGCACAAAATACTG
CCCAAAGAGTGGTGATTTTCCATATAACTTTCGTTCTGAAGGGTCACACTGGCGATAACTCTTCAGTGTT
TCCAGCGGTTCCTTCCTGCTCATGACACCGGTGTCTGGGTCCACTGTGGTTAAAATGCATCTGGAACAAG
CCATCACCCTTTTCAGTTCCACGTCACCAATAAGAAGCTCATCCCAAGAATCCTTAAAAAAGAAGTCAAA
TCCAAGGAAAGATCCAAAGGGGCATAGTGTTACCTCTGCATAGACATCGCATCCTGAAATTACAATATTG
GGCCTGAAGTTGGTTGCTTTAACTTTCTTCTCTAGCCTGGAGTTGAGATCCGCCAGCGACGCCTCAGAAA
GGATCAAGAATGGGCTGGTGTCTGAGTAAGCAATCTGGTCCTTGGGTCGGAACAAGTCTGCTATTTGATG
AGGACGTCTCGGTCGCATGTGAGGCTCGAAGTGCACCAGGCGGTAGGGCTGTGACTTCAGGAAGCTGGTT
ATCCACTGGGCGGTGGCCTCGCCACAGTCCCTGCCCTCTATCTCCAGGCCGTGCACTCTGCACTTGTGCA
CTGCATTTGTGGTGGGCGTTTTGATAGGCAGTAGTAGGTCCTTTGTGTAGGCTGCACTGAGAGTCAGGGT
GTCACCATCGCAGGTCAGGGAAATCAGGACCAGGCGAGGTTCCTGGCGAGCAGTAACCATGTTTCCCTCC
TGGTTGATCACAAGCCAAAACCTTTTAAAAATTTTATGTTCCAACATTCAGTGCTGTCCATTCTGCAATT
TGCTAAACTAGACAGTATTTTTTTCTTCTGGCCCAGTATTCCTGGTCTACAGGTACTTCCTAGAAAAAAA
GATAAATGGAGAAATAAAGGTAATAGAAAGAGCCATTTCCAGAACAAGAACAACATGTTTTTGCAGGTTA
TCTCTCAGCTACCAAGGAAGCAAAACATATTGGCATTTCAATCCTTACAGTACACACTGATCAAATGATT
ACAATTATAGAAGTGAGCATGTGCTTTTGAGATTTCCAGACATAAGAAAAAAATATGGCCGGTACTTTAG
GTCGTTCAAGATATTTCTTGCATCACTTCCAGCAGGTTATCATGGTTGAGTTGTTCAGCTACACTAGAAA
AATATGCTTAGTATAAGCCCTTTCCGTAACTGCCCTTTTACCAGACTTTGTTTCTGCACAGACAGAGGCC
TGCCCTGACCCAAATCCTTGGGACTAGCAGGTGAATATTCTGTCTAATATTCTTCCTGGTAATGGCAGTT
TACATCGCTCTAAAATGCAAATCTAACTTTATGACCCCCTCATTCAAAATCCCTCCATGGTTCCTGCTTT
CAGGATAAAACCAACTCCTAAACAAGGGCGTGCCCAGCCCTTCATGATCCAGCTGTTGCTCCAGCCATTC
TTACCTCCCGAGGTCTTCACACAGGCCAGTCTTTTATATATTTATTTTTTAATTGCAGTAAAATATATAT
AAAACATAAAATACCTAGCACACTCCTACGTATAGACCCCAAAGAACTGAAAACAGGAACTCAAACAGAC
ATTTGTGTATCAATGTTTATTGCAGCTTTAATCAAAATGCTGAAAAAGTAGTAACAGCCCGAGTGTCCAT
CAACAGAGAA
A human MARC1 mRNA may have the sequence of SEQ ID NO: 4005 provided herein.
(SEQ ID NO: 4005)
TTGTCCTCTTTAGGGTCTGGCTTCAGGCCAGCCTCGGGTCTTATTGTGAGGCTGCACTTGAAACTCCTTTCCAGAGC
AGCCCTCGCAGTTCAGCAAGTAACACAGGACTAATGGGAGCTGTAACCTTTCTCCTACCAGCTCCCCAGACAGAGGG
CAATTCATGACATAGTTGAAAGGTTTTGGCTTGTGATCAACCAGGAGGGAAACATGGTTACTGCTCGCCAGGAACCT
CGCCTGGTCCTGATTTCCCTGACCTGCGATGGTGACACCCTGACTCTCAGTGCAGCCTACACAAAGGACCTACTACT
GCCTATCAAAACGCCCACCACAAATGCAGTGCACAAGTGCAGAGTGCACGGCCTGGAGATAGAGGGCAGGGACTGTG
GCGAGGCCACCGCCCAGTGGATAACCAGCTTCCTGAAGTCACAGCCCTACCGCCTGGTGCACTTCGAGCCTCACATG
CGACCGAGACGTCCTCATCAAATAGCAGACTTGTTCCGACCCAAGGACCAGATTGCTTACTCAGACACCAGCCCATT
CTTGATCCTTTCTGAGGCGTCGCTGGCGGATCTCAACTCCAGGCTAGAGAAGAAAGTTAAAGCAACCAACTTCAGGC
CCAATATTGTAATTTCAGGATGCGATGTCTATGCAGAGGTAACACTATGCCCCTTTGGATCTTTCCTTGGATTTGAC
TTCTTTTTTAAGGATTCTTGGGATGAGCTTCTTATTGGTGACGTGGAACTGAAAAGGGTGATGGCTTGTTCCAGATG
CATTTTAACCACAGTGGACCCAGACACCGGTGTCATGAGCAGGAAGGAACCGCTGGAAACACTGAAGAGTTATCGCC
AGTGTGACCCTTCAGAACGAAAGTTATATGGAAAATCACCACTCTTTGGGCAGTATTTTGTGCTGGAAAACCCAGGG
ACCATCAAAGTGGGAGACCCTGTGTACCTGCTGGGCCAGTAATGGGAACCGTATGTCCTGGAATATTAGATGCCTTT
TAAAAATGTTCTCAAAAATGACAACACTTGAAGCATGGTGTTTCAGAACTGAGACCTCTACATTTTCTTTAAATTTG
TGATTTTCACATTTTTCGTCTTTTGGACTTCTGGTGTCTCAATGCTTCAATGTCCCAGTGCAAAAAGTAAAGAAATA
TAGTCTCAATAACTTAGTAGGACTTCAGTAAGTCACTTAAATGACAAGACAGGATTCTGAAAACTCCCCGTTTAACT
GATTATGGAATAGTTCTTTCTCCTGCTTCTCCGTTTATCTACCAAGAGCGCAGACTTGCATCCTGTCACTACCACTC
GTTAGAGAAAGAGAAGAAGAGAAAGAGGAAGAGTGGGTGGGCTGGAAGAATATCCTAGAATGTGTTATTGCCCCTGT
TCATGAGGTACGCAATGAAAATTAAATTGCACCCCAAATATGGCTGGAATGCCACTTCCCTTTTCTTCTCAAGCCCC
GGGCTAGCTTTTGAAATGGCATAAAGACTGAGGTGACCTTCAGGAAGCACTGCAGATATTAATTTTCCATAGATCTG
GATCTGGCCCTGCTGCTTCTCAGACAGCATTGGATTTCCTAAAGGTGCTCAGGAGGATGGTTGTGTAGTCATGGAGG
ACCCCTGGATCCTTGCCATTCCCCTCAGCTAATGACGGAGTGCTCCTTCTCCAGTTCCGGGTGAAAAAGTTCTGAAT
TCTGTGGAGGAGAAGAAAAGTGATTCAGTGATTTCAGATAGACTACTGAAAACCTTTAAAGGGGGAAAAGGAAAGCA
TATGTCAGTTGTTTAAAACCCAATATCTATTTTTTAACTGATTGTATAACTCTAAGATCTGATGAAGTATATTTTTT
ATTGCCATTTTGTCCTTTGATTATATTGGGAAGTTGACTAAACTTGAAAAATGTTTTTAAAACTGTGAATAAATGGA
AGCTACTTTGACTAGTTTCAGA
The reverse complement of SEQ ID NO: 4005 is provided as SEQ ID NO: 4006 herein.
TCTGAAACTAGTCAAAGTAGCTTCCATTTATTCACAGTTTTAAAAACATTTTTCAAGTTTAGTCAACTTC
CCAATATAATCAAAGGACAAAATGGCAATAAAAAATATACTTCATCAGATCTTAGAGTTATACAATCAGT
TAAAAAATAGATATTGGGTTTTAAACAACTGACATATGCTTTCCTTTTCCCCCTTTAAAGGTTTTCAGTA
GTCTATCTGAAATCACTGAATCACTTTTCTTCTCCTCCACAGAATTCAGAACTTTTTCACCCGGAACTGG
AGAAGGAGCACTCCGTCATTAGCTGAGGGGAATGGCAAGGATCCAGGGGTCCTCCATGACTACACAACCA
TCCTCCTGAGCACCTTTAGGAAATCCAATGCTGTCTGAGAAGCAGCAGGGCCAGATCCAGATCTATGGAA
AATTAATATCTGCAGTGCTTCCTGAAGGTCACCTCAGTCTTTATGCCATTTCAAAAGCTAGCCCGGGGCT
TGAGAAGAAAAGGGAAGTGGCATTCCAGCCATATTTGGGGTGCAATTTAATTTTCATTGCGTACCTCATG
AACAGGGGCAATAACACATTCTAGGATATTCTTCCAGCCCACCCACTCTTCCTCTTTCTCTTCTTCTCTT
TCTCTAACGAGTGGTAGTGACAGGATGCAAGTCTGCGCTCTTGGTAGATAAACGGAGAAGCAGGAGAAAG
AACTATTCCATAATCAGTTAAACGGGGAGTTTTCAGAATCCTGTCTTGTCATTTAAGTGACTTACTGAAG
TCCTACTAAGTTATTGAGACTATATTTCTTTACTTTTTGCACTGGGACATTGAAGCATTGAGACACCAGA
AGTCCAAAAGACGAAAAATGTGAAAATCACAAATTTAAAGAAAATGTAGAGGTCTCAGTTCTGAAACACC
ATGCTTCAAGTGTTGTCATTTTTGAGAACATTTTTAAAAGGCATCTAATATTCCAGGACATACGGTTCCC
ATTACTGGCCCAGCAGGTACACAGGGTCTCCCACTTTGATGGTCCCTGGGTTTTCCAGCACAAAATACTG
CCCAAAGAGTGGTGATTTTCCATATAACTTTCGTTCTGAAGGGTCACACTGGCGATAACTCTTCAGTGTT
TCCAGCGGTTCCTTCCTGCTCATGACACCGGTGTCTGGGTCCACTGTGGTTAAAATGCATCTGGAACAAG
CCATCACCCTTTTCAGTTCCACGTCACCAATAAGAAGCTCATCCCAAGAATCCTTAAAAAAGAAGTCAAA
TCCAAGGAAAGATCCAAAGGGGCATAGTGTTACCTCTGCATAGACATCGCATCCTGAAATTACAATATTG
GGCCTGAAGTTGGTTGCTTTAACTTTCTTCTCTAGCCTGGAGTTGAGATCCGCCAGCGACGCCTCAGAAA
GGATCAAGAATGGGCTGGTGTCTGAGTAAGCAATCTGGTCCTTGGGTCGGAACAAGTCTGCTATTTGATG
AGGACGTCTCGGTCGCATGTGAGGCTCGAAGTGCACCAGGCGGTAGGGCTGTGACTTCAGGAAGCTGGTT
ATCCACTGGGCGGTGGCCTCGCCACAGTCCCTGCCCTCTATCTCCAGGCCGTGCACTCTGCACTTGTGCA
CTGCATTTGTGGTGGGCGTTTTGATAGGCAGTAGTAGGTCCTTTGTGTAGGCTGCACTGAGAGTCAGGGT
GTCACCATCGCAGGTCAGGGAAATCAGGACCAGGCGAGGTTCCTGGCGAGCAGTAACCATGTTTCCCTCC
TGGTTGATCACAAGCCAAAACCTTTCAACTATGTCATGAATTGCCCTCTGTCTGGGGAGCTGGTAGGAGA
AAGGTTACAGCTCCCATTAGTCCTGTGTTACTTGCTGAACTGCGAGGGCTGCTCTGGAAAGGAGTTTCAA
GTGCAGCCTCACAATAAGACCCGAGGCTGGCCTGAAGCCAGACCCTAAAGAGGACAA
A human MARC1 mRNA may have the sequence of SEQ ID NO: 4007 provided herein.
(SEQ ID NO: 4007)
ACCTGTAGACCAGGAATACTGGGCCAGAAGAAAAAAATACTGTCTAGTTTAGCAAATTGCAGAATGGACAGCACTGA
ATGTTGGAACATAAAATTTTTAAAAGGTTTTGGCTTGTGATCAACCAGGAGGGAAACATGGTTACTGCTCGCCAGGA
ACCTCGCCTGGTCCTGATTTCCCTGACCTGCGATGGTGACACCCTGACTCTCAGTGCAGCCTACACAAAGGACCTAC
TACTGCCTATCAAAACGCCCACCACAAATGCAGTGCACAAGTGCAGAGTGCACGGCCTGGAGATAGAGGGCAGGGAC
TGTGGCGAGGCCACCGCCCAGTGGATAACCAGCTTCCTGAAGTCACAGCCCTACCGCCTGGTGCACTTCGAGCCTCA
CATGCGACCGAGACGTCCTCATCAAATAGCAGACTTGTTCCGACCCAAGGACCAGATTGCTTACTCAGACACCAGCC
CATTCTTGATCCTTTCTGAGGCGTCGCTGGCGGATCTCAACTCCAGGCTAGAGAAGAAAGTTAAAGCAACCAACTTC
AGGCCCAATATTGTAATTTCAGGATGCGATGTCTATGCAGAGGATTCTTGGGATGAGCTTCTTATTGGTGACGTGGA
ACTGAAAAGGGTGATGGCTTGTTCCAGATGCATTTTAACCACAGTGGACCCAGACACCGGTGTCATGAGCAGGAAGG
AACCGCTGGAAACACTGAAGAGTTATCGCCAGTGTGACCCTTCAGAACGAAAGTTATATGGAAAATCACCACTCTTT
GGGCAGTATTTTGTGCTGGAAAACCCAGGGACCATCAAAGTGGGAGACCCTGTGTACCTGCTGGGCCAGTAATGGGA
ACCGTATGTCCTGGAATATTAGATGCCTTTTAAAAATGTTCTCAAAAATGACAACACTTGAAGCATGGTGTTTCAGA
ACTGAGACCTCTACATTTTCTTTAAATTTGTGATTTTCACATTTTTCGTCTTTTGGACTTCTGGTGTCTCAATGCTT
CAATGTCCCAGTGCAAAAAGTAAAGAAATATAGTCTCAATAACTTAGTAGGACTTCAGTAAGTCACTTAAATGACAA
GACAGGATTCTGAAAACTCCCCGTTTAACTGATTATGGAATAGTTCTTTCTCCTGCTTCTCCGTTTATCTACCAAGA
GCGCAGACTTGCATCCTGTCACTACCACTCGTTAGAGAAAGAGAAGAAGAGAAAGAGGAAGAGTGGGTGGGCTGGAA
GAATATCCTAGAATGTGTTATTGCCCCTGTTCATGAGGTACGCAATGAAAATTAAATTGCACCCCAAATATGGCTGG
AATGCCACTTCCCTTTTCTTCTCAAGCCCCGGGCTAGCTTTTGAAATGGCATAAAGACTGAGGTGACCTTCAGGAAG
CACTGCAGATATTAATTTTCCATAGATCTGGATCTGGCCCTGCTGCTTCTCAGACAGCATTGGATTTCCTAAAGGTG
CTCAGGAGGATGGTTGTGTAGTCATGGAGGACCCCTGGATCCTTGCCATTCCCCTCAGCTAATGACGGAGTGCTCCT
TCTCCAGTTCCGGGTGAAAAAGTTCTGAATTCTGTGGAGGAGAAGAAAAGTGATTCAGTGATTTCAGATAGACTACT
GAAAACCTTTAAAGGGGGAAAAGGAAAGCATATGTCAGTTGTTTAAAACCCAATATCTATTTTTTAACTGATTGTAT
AACTCTAAGATCTGATGAAGTATATTTTTTATTGCCATTTTGTCCTTTGATTATATTGGGAAGTTGACTAAACTTGA
AAAATGTTTTTAAAACTGTGAATAAATGGAAGCTACTTTGACTAGTTTCAGA
The reverse complement of SEQ ID NO: 4007 is provided as SEQ ID NO: 4008 herein.
(SEQ ID NO: 4008)
TCTGAAACTAGTCAAAGTAGCTTCCATTTATTCACAGTTTTAAAAACATTTTTCAAGTTTAGTCAACTTC
CCAATATAATCAAAGGACAAAATGGCAATAAAAAATATACTTCATCAGATCTTAGAGTTATACAATCAGT
TAAAAAATAGATATTGGGTTTTAAACAACTGACATATGCTTTCCTTTTCCCCCTTTAAAGGTTTTCAGTA
GTCTATCTGAAATCACTGAATCACTTTTCTTCTCCTCCACAGAATTCAGAACTTTTTCACCCGGAACTGG
AGAAGGAGCACTCCGTCATTAGCTGAGGGGAATGGCAAGGATCCAGGGGTCCTCCATGACTACACAACCA
TCCTCCTGAGCACCTTTAGGAAATCCAATGCTGTCTGAGAAGCAGCAGGGCCAGATCCAGATCTATGGAA
AATTAATATCTGCAGTGCTTCCTGAAGGTCACCTCAGTCTTTATGCCATTTCAAAAGCTAGCCCGGGGCT
TGAGAAGAAAAGGGAAGTGGCATTCCAGCCATATTTGGGGTGCAATTTAATTTTCATTGCGTACCTCATG
AACAGGGGCAATAACACATTCTAGGATATTCTTCCAGCCCACCCACTCTTCCTCTTTCTCTTCTTCTCTT
TCTCTAACGAGTGGTAGTGACAGGATGCAAGTCTGCGCTCTTGGTAGATAAACGGAGAAGCAGGAGAAAG
AACTATTCCATAATCAGTTAAACGGGGAGTTTTCAGAATCCTGTCTTGTCATTTAAGTGACTTACTGAAG
TCCTACTAAGTTATTGAGACTATATTTCTTTACTTTTTGCACTGGGACATTGAAGCATTGAGACACCAGA
AGTCCAAAAGACGAAAAATGTGAAAATCACAAATTTAAAGAAAATGTAGAGGTCTCAGTTCTGAAACACC
ATGCTTCAAGTGTTGTCATTTTTGAGAACATTTTTAAAAGGCATCTAATATTCCAGGACATACGGTTCCC
ATTACTGGCCCAGCAGGTACACAGGGTCTCCCACTTTGATGGTCCCTGGGTTTTCCAGCACAAAATACTG
CCCAAAGAGTGGTGATTTTCCATATAACTTTCGTTCTGAAGGGTCACACTGGCGATAACTCTTCAGTGTT
TCCAGCGGTTCCTTCCTGCTCATGACACCGGTGTCTGGGTCCACTGTGGTTAAAATGCATCTGGAACAAG
CCATCACCCTTTTCAGTTCCACGTCACCAATAAGAAGCTCATCCCAAGAATCCTCTGCATAGACATCGCA
TCCTGAAATTACAATATTGGGCCTGAAGTTGGTTGCTTTAACTTTCTTCTCTAGCCTGGAGTTGAGATCC
GCCAGCGACGCCTCAGAAAGGATCAAGAATGGGCTGGTGTCTGAGTAAGCAATCTGGTCCTTGGGTCGGA
ACAAGTCTGCTATTTGATGAGGACGTCTCGGTCGCATGTGAGGCTCGAAGTGCACCAGGCGGTAGGGCTG
TGACTTCAGGAAGCTGGTTATCCACTGGGCGGTGGCCTCGCCACAGTCCCTGCCCTCTATCTCCAGGCCG
TGCACTCTGCACTTGTGCACTGCATTTGTGGTGGGCGTTTTGATAGGCAGTAGTAGGTCCTTTGTGTAGG
CTGCACTGAGAGTCAGGGTGTCACCATCGCAGGTCAGGGAAATCAGGACCAGGCGAGGTTCCTGGCGAGC
AGTAACCATGTTTCCCTCCTGGTTGATCACAAGCCAAAACCTTTTAAAAATTTTATGTTCCAACATTCAG
TGCTGTCCATTCTGCAATTTGCTAAACTAGACAGTATTTTTTTCTTCTGGCCCAGTATTCCTGGTCTACA
GGT
A human MARC1 mRNA sequence may have the sequence of SEQ ID NO: 4009 herein.
CTTCAGGCCAGCCTCGGGTCTTATTGTGAGGCTGCACTTGAAACTCCTTTCCAGAGCAGCCCTCGCAGTT
CAGCAAGTAACACAGGACTAATGGGAGCTGTAACCTTTCTCCTACCAGCTCCCCAGACAGAGGGCAATTC
ATGACATAGTTGAAAGGTTTTGGCTTGTGATCAACCAGGAGGGAAACATGGTTACTGCTCGCCAGGAACC
TCGCCTGGTCCTGATTTCCCTGACCTGCGATGGTGACACCCTGACTCTCAGTGCAGCCTACACAAAGGAC
CTACTACTGCCTATCAAAACGCCCACCACAAATGCAGTGCACAAGTGCAGAGTGCACGGCCTGGAGATAG
AGGGCAGGGACTGTGGCGAGGCCACCGCCCAGTGGATAACCAGCTTCCTGAAGTCACAGCCCTACCGCCT
GGTGCACTTCGAGCCTCACATGCGACCGAGACGTCCTCATCAAATAGCAGACTTGTTCCGACCCAAGGAC
CAGATTGCTTACTCAGACACCAGCCCATTCTTGATCCTTTCTGAGGCGTCGCTGGCGGATCTCAACTCCA
GGCTAGAGAAGAAAGTTAAAGCAACCAACTTCAGGCCCAATATTGTAATTTCAGGATGCGATGTCTATGC
AGAGGATTCTTGGGATGAGCTTCTTATTGGTGACGTGGAACTGAAAAGGGTGATGGCTTGTTCCAGATGC
ATTTTAACCACAGTGGACCCAGACACCGGTGTCATGAGCAGGAAGGAACCGCTGGAAACACTGAAGAGTT
ATCGCCAGTGTGACCCTTCAGAACGAAAGTTATATGGAAAATCACCACTCTTTGGGCAGTATTTTGTGCT
GGAAAACCCAGGGACCATCAAAGTGGGAGACCCTGTGTACCTGCTGGGCCAGTAATGGGAACCGTATGTC
CTGGAATATTAGATGCCTTTTAAAAATGTTCTCAAAAATGACAACACTTGAAGCATGGTGTTTCAGAACT
GAGACCTCTACATTTTCTTTAAATTTGTGATTTTCACATTTTTCGTCTTTTGGACTTCTGGTGTCTCAAT
GCTTCAATGTCCCAGTGCAAAAAGTAAAGAAATATAGTCTCAATAACTTAGTAGGACTTCAGTAAGTCAC
TTAAATGACAAGACAGGATTCTGAAAACTCCCCGTTTAACTGATTATGGAATAGTTCTTTCTCCTGCTTC
TCCGTTTATCTACCAAGAGCGCAGACTTGCATCCTGTCACTACCACTCGTTAGAGAAAGAGAAGAAGAGA
AAGAGGAAGAGTGGGTGGGCTGGAAGAATATCCTAGAATGTGTTATTGCCCCTGTTCATGAGGTACGCAA
TGAAAATTAAATTGCACCCCAAATATGGCTGGAATGCCACTTCCCTTTTCTTCTCAAGCCCCGGGCTAGC
TTTTGAAATGGCATAAAGACTGAGGTGACCTTCAGGAAGCACTGCAGATATTAATTTTCCATAGATCTGG
ATCTGGCCCTGCTGCTTCTCAGACAGCATTGGATTTCCTAAAGGTGCTCAGGAGGATGGTTGTGTAGTCA
TGGAGGACCCCTGGATCCTTGCCATTCCCCTCAGCTAATGACGGAGTGCTCCTTCTCCAGTTCCGGGTGA
AAAAGTTCTGAATTCTGTGGAGGAGAAGAAAAGTGATTCAGTGATTTCAGATAGACTACTGAAAACCTTT
AAAGGGGGAAAAGGAAAGCATATGTCAGTTGTTTAAAACCCAATATCTATTTTTTAACTGATTGTATAAC
TCTAAGATCTGATGAAGTATATTTTTTATTGCCATTTTGTCCTTTGATTATATTGGGAAGTTGACTAAAC
TTGAAAAATGTTTTTAAAACTGTGAATAAATGGAAGCTACTTTGACTAGTTTCAGA
The reverse complement of SEQ ID NO: 4009 is provided as SEQ ID NO: 4010 herein.
TCTGAAACTAGTCAAAGTAGCTTCCATTTATTCACAGTTTTAAAAACATTTTTCAAGTTTAGTCAACTTC
CCAATATAATCAAAGGACAAAATGGCAATAAAAAATATACTTCATCAGATCTTAGAGTTATACAATCAGT
TAAAAAATAGATATTGGGTTTTAAACAACTGACATATGCTTTCCTTTTCCCCCTTTAAAGGTTTTCAGTA
GTCTATCTGAAATCACTGAATCACTTTTCTTCTCCTCCACAGAATTCAGAACTTTTTCACCCGGAACTGG
AGAAGGAGCACTCCGTCATTAGCTGAGGGGAATGGCAAGGATCCAGGGGTCCTCCATGACTACACAACCA
TCCTCCTGAGCACCTTTAGGAAATCCAATGCTGTCTGAGAAGCAGCAGGGCCAGATCCAGATCTATGGAA
AATTAATATCTGCAGTGCTTCCTGAAGGTCACCTCAGTCTTTATGCCATTTCAAAAGCTAGCCCGGGGCT
TGAGAAGAAAAGGGAAGTGGCATTCCAGCCATATTTGGGGTGCAATTTAATTTTCATTGCGTACCTCATG
AACAGGGGCAATAACACATTCTAGGATATTCTTCCAGCCCACCCACTCTTCCTCTTTCTCTTCTTCTCTT
TCTCTAACGAGTGGTAGTGACAGGATGCAAGTCTGCGCTCTTGGTAGATAAACGGAGAAGCAGGAGAAAG
AACTATTCCATAATCAGTTAAACGGGGAGTTTTCAGAATCCTGTCTTGTCATTTAAGTGACTTACTGAAG
TCCTACTAAGTTATTGAGACTATATTTCTTTACTTTTTGCACTGGGACATTGAAGCATTGAGACACCAGA
AGTCCAAAAGACGAAAAATGTGAAAATCACAAATTTAAAGAAAATGTAGAGGTCTCAGTTCTGAAACACC
ATGCTTCAAGTGTTGTCATTTTTGAGAACATTTTTAAAAGGCATCTAATATTCCAGGACATACGGTTCCC
ATTACTGGCCCAGCAGGTACACAGGGTCTCCCACTTTGATGGTCCCTGGGTTTTCCAGCACAAAATACTG
CCCAAAGAGTGGTGATTTTCCATATAACTTTCGTTCTGAAGGGTCACACTGGCGATAACTCTTCAGTGTT
TCCAGCGGTTCCTTCCTGCTCATGACACCGGTGTCTGGGTCCACTGTGGTTAAAATGCATCTGGAACAAG
CCATCACCCTTTTCAGTTCCACGTCACCAATAAGAAGCTCATCCCAAGAATCCTCTGCATAGACATCGCA
TCCTGAAATTACAATATTGGGCCTGAAGTTGGTTGCTTTAACTTTCTTCTCTAGCCTGGAGTTGAGATCC
GCCAGCGACGCCTCAGAAAGGATCAAGAATGGGCTGGTGTCTGAGTAAGCAATCTGGTCCTTGGGTCGGA
ACAAGTCTGCTATTTGATGAGGACGTCTCGGTCGCATGTGAGGCTCGAAGTGCACCAGGCGGTAGGGCTG
TGACTTCAGGAAGCTGGTTATCCACTGGGCGGTGGCCTCGCCACAGTCCCTGCCCTCTATCTCCAGGCCG
TGCACTCTGCACTTGTGCACTGCATTTGTGGTGGGCGTTTTGATAGGCAGTAGTAGGTCCTTTGTGTAGG
CTGCACTGAGAGTCAGGGTGTCACCATCGCAGGTCAGGGAAATCAGGACCAGGCGAGGTTCCTGGCGAGC
AGTAACCATGTTTCCCTCCTGGTTGATCACAAGCCAAAACCTTTCAACTATGTCATGAATTGCCCTCTGT
CTGGGGAGCTGGTAGGAGAAAGGTTACAGCTCCCATTAGTCCTGTGTTACTTGCTGAACTGCGAGGGCTG
CTCTGGAAAGGAGTTTCAAGTGCAGCCTCACAATAAGACCCGAGGCTGGCCTGAAG
A murine MARC1 mRNA may have the sequence of SEQ ID NO: 4011 herein.
AGCTGAGCCACCACCTCCCGCCCAGGCCGAATGAAGATGCACAATTTGGATTGGAGGGGAAGGGTCAGGAGCTGCTG
ACCTTTGGGCTCAGGCCCAGGCCGCTGGCCACAGTAGCTCTTGGTCCAGTCGGCGCCGGAGGTGTATCAAGCGCTCA
TCCCGCCCTCTCCAGTCATGGGTGCGGGGTCCTGGGCGCTGACCCTCTTCGGCTTCTCCGCGTTTCGGGTCCCGGGC
CAGCCGCGGTCCACCTGGCTCGGCGTCGCCGCGCTGGGACTGGCCGCGGTGGCCCTGGGGACAGTGGCCTGGCGTCG
TGCGCGTCCCCGGCGACGCCGGCGGCTACAGCAAGTGGGAACGGTGGCACAGCTCTGGATCTACCCAATCAAGTCCT
GCAAGGGGTTGTCGGTGAGCGAGGCAGAGTGCACTGCCATGGGGCTGCGCTATGGCCACCTGCGCGACAGGTTTTGG
CTCGTGATCAATGAAGAGGGGAACATGGTCACTGCCCGGCAGGAGCCTCGATTGGTCCTGATTTCTCTGACCTGTGA
GGACGACACCTTGACTCTCAGTGCAGCTTACACAAAGGACCTGCTGCTGCCTATCACCCCGCCTGCCACAAACCCAC
TCCTCCAGTGCAGAGTGCATGGCCTGGAGATACAGGGCAGGGATTGTGGAGAGGATGCAGCTCAGTGGGTCAGCAGC
TTCTTGAAGATGCAGTCCTGTCGCCTGGTGCACTTCGAGCCGCACATGCGCCCCAGAAGTTCTCGGCAAATGAAGGC
TGTGTTCCGGACCAAGGACCAGGTGGCCTACTCAGATGCAAGTCCATTCTTGGTCCTTTCTGAGGCATCCTTGGAAG
ATCTCAACTCCAGGCTGGAGCGCAGAGTGAAAGCGACAAACTTCAGGCCTAACATTGTCATCTCGGGATGTGGCGTT
TATGCTGAGGATTCTTGGAACGAGGTTCTCATTGGAGATGTGGAACTGAAACGGGTGATGGCTTGTACCCGGTGCCT
TTTAACAACAGTGGATCCAGACACTGGCATCTCGGACAGGAAGGAGCCTCTGGAAACACTGAAGAGCTACCGCCTGT
GTGACCCTTCCGAGCAAGCACTATATGGAAAGTTACCCATCTTTGGACAATACTTCGCTCTGGAAAATCCAGGGACA
ATCAGAGTGGGAGACCCTGTGTACCTCCTGGGCCAGTGATGGGAACTGTTCGTTCTGGAAGAACAGATGGCTCTTAA
AAAAAAACTTTTACAAACAGACATCGCTTGAAACAGTTCTTCAGCCTGTTCTTTGGATCGGCCAGTTCCAAGTTTCT
CTTCTTTCAGATTTCCGTCTGTTTCAATGTTTCCTGGGGCCAGCCCACAAAGCAGGCAAATACAGCTTTGCGAACTT
AGCAGGTCCCTGTTATGTTTCTTGTAGAATGAAGGGATTATCATATTGCCCTGTTTATAAATACGGAGTAATCCTTC
TACGTCGGAATTCACTTGCCAAGACATCATCTCCCTAGCCTTCTTTTGGGAAAGAGAAGAAAAAGGGAGGGACACTG
TGTAAGCCAGAAGAATGTTCCAGAATGTTCTGTTACCCCTGGACATGGTGCATACAACGGGAATTAAATACTCTCCC
AAGTAAAGTTGGAATGACGGCTTTTACTTTTCTCCTTGAGCCCAGGCTTTGGAAAGAGTTTAAAGAGCAAGCCCTAA
AGATATTGGATGCTGTTGCTTACTGACAGTGTGAAGTTTGACAGACCCTTTAGCCCAAGAACACGAAGTGTCAGGGT
CAAAGCCAGCTCTCTACAGCATCCAGACGGGCTCTCAGCTCTGTGAAAAAGGTGTTTCCACTCTTGAAGCAAAGTGT
TGATGCGCCTCACTAAAGGATTCAAGATCGTTCCTAGCATGTGGGGACAGATAGTGACACCAGAGAGGGAGATACCT
CCGCCTGGGTGTCTAAGATGAGATTTGATCTTGCCCAGGAAAATGGTGGCTCTCTTAATATGAGCAAAATGAAATGG
TGGCGCCCCCTAGTGGTAGTGAATGGTAGGTCGGCCCACCTTGAGAAAAATTTAAAAAGGGGAAAAACAAAACAAAA
CAAAACCAAAGCAATCTTGTGCTTGTTGTTTAGTTTTAAATTTTAAAACGTTTTAAAAACTGAAAAAAA
The reverse complement of SEQ ID NO: 4011 is provided as SEQ ID NO: 4012 herein.
TTTTTTTCAGTTTTTAAAACGTTTTAAAATTTAAAACTAAACAACAAGCACAAGATTGCTTTGGTTTTGT
TTTGTTTTGTTTTTCCCCTTTTTAAATTTTTCTCAAGGTGGGCCGACCTACCATTCACTACCAGTAGGGG
GCGCCACCATTTCATTTTGCTCATATTAAGAGAGCCACCATTTTCCTGGGCAAGATCAAATCTCATCTTA
GACACCCAGGCGGAGGTATCTCCCTCTCTGGTGTCACTATCTGTCCCCACATGCTAGGAACGATCTTGAA
TCCTTTAGTGAGGCGCATCAACACTTTGCTTCAAGAGTGGAAACACCTTTTTCACAGAGCTGAGAGCCCG
TCTGGATGCTGTAGAGAGCTGGCTTTGACCCTGACACTTCGTGTTCTTGGGCTAAAGGGTCTGTCAAACT
TCACACTGTCAGTAAGCAACAGCATCCAATATCTTTAGGGCTTGCTCTTTAAACTCTTTCCAAAGCCTGG
GCTCAAGGAGAAAAGTAAAAGCCGTCATTCCAACTTTACTTGGGAGAGTATTTAATTCCCGTTGTATGCA
CCATGTCCAGGGGTAACAGAACATTCTGGAACATTCTTCTGGCTTACACAGTGTCCCTCCCTTTTTCTTC
TCTTTCCCAAAAGAAGGCTAGGGAGATGATGTCTTGGCAAGTGAATTCCGACGTAGAAGGATTACTCCGT
ATTTATAAACAGGGCAATATGATAATCCCTTCATTCTACAAGAAACATAACAGGGACCTGCTAAGTTCGC
AAAGCTGTATTTGCCTGCTTTGTGGGCTGGCCCCAGGAAACATTGAAACAGACGGAAATCTGAAAGAAGA
GAAACTTGGAACTGGCCGATCCAAAGAACAGGCTGAAGAACTGTTTCAAGCGATGTCTGTTTGTAAAAGT
TTTTTTTTAAGAGCCATCTGTTCTTCCAGAACGAACAGTTCCCATCACTGGCCCAGGAGGTACACAGGGT
CTCCCACTCTGATTGTCCCTGGATTTTCCAGAGCGAAGTATTGTCCAAAGATGGGTAACTTTCCATATAG
TGCTTGCTCGGAAGGGTCACACAGGCGGTAGCTCTTCAGTGTTTCCAGAGGCTCCTTCCTGTCCGAGATG
CCAGTGTCTGGATCCACTGTTGTTAAAAGGCACCGGGTACAAGCCATCACCCGTTTCAGTTCCACATCTC
CAATGAGAACCTCGTTCCAAGAATCCTCAGCATAAACGCCACATCCCGAGATGACAATGTTAGGCCTGAA
GTTTGTCGCTTTCACTCTGCGCTCCAGCCTGGAGTTGAGATCTTCCAAGGATGCCTCAGAAAGGACCAAG
AATGGACTTGCATCTGAGTAGGCCACCTGGTCCTTGGTCCGGAACACAGCCTTCATTTGCCGAGAACTTC
TGGGGCGCATGTGCGGCTCGAAGTGCACCAGGCGACAGGACTGCATCTTCAAGAAGCTGCTGACCCACTG
AGCTGCATCCTCTCCACAATCCCTGCCCTGTATCTCCAGGCCATGCACTCTGCACTGGAGGAGTGGGTTT
GTGGCAGGCGGGGTGATAGGCAGCAGCAGGTCCTTTGTGTAAGCTGCACTGAGAGTCAAGGTGTCGTCCT
CACAGGTCAGAGAAATCAGGACCAATCGAGGCTCCTGCCGGGCAGTGACCATGTTCCCCTCTTCATTGAT
CACGAGCCAAAACCTGTCGCGCAGGTGGCCATAGCGCAGCCCCATGGCAGTGCACTCTGCCTCGCTCACC
GACAACCCCTTGCAGGACTTGATTGGGTAGATCCAGAGCTGTGCCACCGTTCCCACTTGCTGTAGCCGCC
GGCGTCGCCGGGGACGCGCACGACGCCAGGCCACTGTCCCCAGGGCCACCGCGGCCAGTCCCAGCGCGGC
GACGCCGAGCCAGGTGGACCGCGGCTGGCCCGGGACCCGAAACGCGGAGAAGCCGAAGAGGGTCAGCGCC
CAGGACCCCGCACCCATGACTGGAGAGGGCGGGATGAGCGCTTGATACACCTCCGGCGCCGACTGGACCA
AGAGCTACTGTGGCCAGCGGCCTGGGCCTGAGCCCAAAGGTCAGCAGCTCCTGACCCTTCCCCTCCAATC
CAAATTGTGCATCTTCATTCGGCCTGGGCGGGAGGTGGTGGCTCAGCT

[0151] A primate MARC1 mRNA, e.g., a cynomolgus monkey MARC1, may have the sequence of XM_005540898, XM_005540899, XM_005540901, XR_001490726, XR_273286, XR_273285, XR_001490723, or XR_001490722, which are incorporated by reference in their entirety. A rat MARC1 mRNA may have the sequence XM_017598938, or NM_001100811, which are incorporated by reference in their entirety. A dog MARC1 mRNA may have the mRNA sequence XM_005640829, which is incorporated by reference in its entirety.

[0152] As used herein, an iRNA is said to target within a particular site of an RNA transcript if the iRNA promotes cleavage of the transcript anywhere within that particular site. Such an iRNA will generally include at least 15 contiguous nucleotides from one of the sequences provided in Tables 2A-2B, 3A-3B, or 4A-4B, coupled to additional nucleotide sequences taken from the region contiguous to the selected sequence in a MARC1 gene.

[0153] While a target sequence is generally 15-30 nucleotides in length, there is wide variation in the suitability of particular sequences in this range for directing cleavage of any given target RNA. Various software packages and the guidelines set out herein provide guidance for the identification of optimal target sequences for any given gene target, but an empirical approach can also be taken in which a “window” or “mask” of a given size (as a non-limiting example, 21 nucleotides) is literally or figuratively (including, e.g., in silico) placed on the target RNA sequence to identify sequences in the size range that may serve as target sequences. By moving the sequence “window” progressively one nucleotide upstream or downstream of an initial target sequence location, the next potential target sequence can be identified, until the complete set of possible sequences is identified for any given target size selected. This process, coupled with systematic synthesis and testing of the identified sequences (using assays described herein or known in the art) to identify those sequences that perform optimally can identify those RNA sequences that, when targeted with an iRNA agent, mediate the best inhibition of target gene expression. Thus, it is contemplated that further optimization of inhibition efficiency can be achieved by progressively “walking the window” one nucleotide upstream or downstream of the given sequences to identify sequences with equal or better inhibition characteristics.

[0154] Further, it is contemplated that for any sequence identified, e.g., in Tables 2A-2B, 3A-3B, or 4A-4B, further optimization can be achieved by systematically either adding or removing nucleotides to generate longer or shorter sequences and testing those and sequences generated by walking a window of the longer or shorter size up or down the target RNA from that point. Again, coupling this approach to generating new candidate targets with testing for effectiveness of iRNAs based on those target sequences in an inhibition assay as known in the art or as described herein can lead to further improvements in the efficiency of inhibition. Further still, such optimized sequences can be adjusted by, e.g., the introduction of modified nucleotides as described herein or as known in the art, addition or changes in overhang, or other modifications as known in the art and/or discussed herein to further optimize the molecule (e.g., increasing serum stability or circulating half-life, increasing thermal stability, enhancing transmembrane delivery, targeting to a particular location or cell type, increasing interaction with silencing pathway enzymes, increasing release from endosomes, etc.) as an expression inhibitor.

[0155] An iRNA as described herein can contain one or more mismatches to the target sequence. In some embodiments, an iRNA as described herein contains no more than 3 mismatches. In some embodiments, when the antisense strand of the iRNA contains mismatches to a target sequence, the area of mismatch is not located in the center of the region of complementarity. In some embodiments, when the antisense strand of the iRNA contains mismatches to the target sequence, the mismatch is restricted to be within the last 5 nucleotides from either the 5′ or 3′ end of the region of complementarity. For example, for a 23 nucleotide iRNA agent RNA strand which is complementary to a region of a MARC1 gene, the RNA strand generally does not contain any mismatch within the central 13 nucleotides. The methods described herein or methods known in the art can be used to determine whether an iRNA containing a mismatch to a target sequence is effective in inhibiting the expression of a MARC1 gene. Consideration of the efficacy of iRNAs with mismatches in inhibiting expression of a MARC1 gene is important, especially if the particular region of complementarity in a MARC1 gene is known to have polymorphic sequence variation within the population.

[0156] In some embodiments, at least one end of a dsRNA has a single-stranded nucleotide overhang of 1 to 4, generally 1 or 2 nucleotides. In some embodiments, dsRNAs having at least one nucleotide overhang have superior inhibitory properties relative to their blunt-ended counterparts. In some embodiments, the RNA of an iRNA (e.g., a dsRNA) is chemically modified to enhance stability or other beneficial characteristics. The nucleic acids featured in the disclosure may be synthesized and/or modified by methods well established in the art, such as those described in “Current protocols in nucleic acid chemistry,” Beaucage, S. L. et al. (Edrs.), John Wiley & Sons, Inc., New York, N.Y., USA, which is hereby incorporated herein by reference. Modifications include, for example, (a) end modifications, e.g., 5′ end modifications (phosphorylation, conjugation, inverted linkages, etc.) 3′ end modifications (conjugation, DNA nucleotides, inverted linkages, etc.), (b) base modifications, e.g., replacement with stabilizing bases, destabilizing bases, or bases that base pair with an expanded repertoire of partners, removal of bases (abasic nucleotides), or conjugated bases, (c) sugar modifications (e.g., at the 2′ position or 4′ position, or having an acyclic sugar) or replacement of the sugar, as well as (d) backbone modifications, including modification or replacement of the phosphodiester linkages Specific examples of RNA compounds useful in this disclosure include, but are not limited to RNAs containing modified backbones or no natural internucleoside linkages RNAs having modified backbones include, among others, those that do not have a phosphorus atom in the backbone. For the purposes of this specification, and as sometimes referenced in the art, modified RNAs that do not have a phosphorus atom in their internucleoside backbone can also be considered to be oligonucleosides. In particular embodiments, the modified RNA will have a phosphorus atom in its internucleoside backbone.

[0157] Modified RNA backbones include, for example, phosphorothioates, chiral phosphorothioates, phosphorodithioates, phosphotriesters, aminoalkylphosphotriesters, methyl and other alkyl phosphonates including 3′-alkylene phosphonates and chiral phosphonates, phosphinates, phosphoramidates including 3′-amino phosphoramidate and aminoalkylphosphoramidates, thionophosphoramidates, thionoalkylphosphonates, thionoalkylphosphotriesters, and boranophosphates having normal 3′-5′ linkages, 2′-5′ linked analogs of these, and those) having inverted polarity wherein the adjacent pairs of nucleoside units are linked 3′-5′ to 5′-3′ or 2′-5′ to 5′-2′. Various salts, mixed salts and free acid forms are also included.

[0158] Representative U.S. patents that teach the preparation of the above phosphorus-containing linkages include, but are not limited to, U.S. Pat. Nos. 3,687,808; 4,469,863; 4,476,301; 5,023,243; 5,177,195; 5,188,897; 5,264,423; 5,276,019; 5,278,302; 5,286,717; 5,321,131; 5,399,676; 5,405,939; 5,453,496; 5,455,233; 5,466,677; 5,476,925; 5,519,126; 5,536,821; 5,541,316; 5,550,111; 5,563,253; 5,571,799; 5,587,361; 5,625,050; 6,028,188; 6,124,445; 6,160,109; 6,169,170; 6,172,209; 6,239,265; 6,277,603; 6,326,199; 6,346,614; 6,444,423; 6,531,590; 6,534,639; 6,608,035; 6,683,167; 6,858,715; 6,867,294; 6,878,805; 7,015,315; 7,041,816; 7,273,933; 7,321,029; and U.S. Pat. RE39464, each of which is herein incorporated by reference.

[0159] Modified RNA backbones that do not include a phosphorus atom therein have backbones that are formed by short chain alkyl or cycloalkyl internucleoside linkages, mixed heteroatoms and alkyl or cycloalkyl internucleoside linkages, or one or more short chain heteroatomic or heterocyclic internucleoside linkages. These include those having morpholino linkages (formed in part from the sugar portion of a nucleoside); siloxane backbones; sulfide, sulfoxide and sulfone backbones; formacetyl and thioformacetyl backbones; methylene formacetyl and thioformacetyl backbones; alkene containing backbones; sulfamate backbones; methyleneimino and methylenehydrazino backbones; sulfonate and sulfonamide backbones; amide backbones; and others having mixed N, O, S and CH₂ component parts.

[0160] Representative U.S. patents that teach the preparation of the above oligonucleosides include, but are not limited to, U.S. Pat. Nos. 5,034,506; 5,166,315; 5,185,444; 5,214,134; 5,216,141; 5,235,033; 5,64,562; 5,264,564; 5,405,938; 5,434,257; 5,466,677; 5,470,967; 5,489,677; 5,541,307; 5,561,225; 5,596,086; 5,602,240; 5,608,046; 5,610,289; 5,618,704; 5,623,070; 5,663,312; 5,633,360; 5,677,437; and, 5,677,439, each of which is herein incorporated by reference.

[0161] In other RNA mimetics suitable or contemplated for use in iRNAs, both the sugar and the internucleoside linkage, i.e., the backbone, of the nucleotide units are replaced with novel groups. The base units are maintained for hybridization with an appropriate nucleic acid target compound. One such oligomeric compound, an RNA mimetic that has been shown to have excellent hybridization properties, is referred to as a peptide nucleic acid (PNA). In PNA compounds, the sugar backbone of an RNA is replaced with an amide containing backbone, in particular an aminoethylglycine backbone. The nucleobases are retained and are bound directly or indirectly to aza nitrogen atoms of the amide portion of the backbone. Representative U.S. patents that teach the preparation of PNA compounds include, but are not limited to, U.S. Pat. Nos. 5,539,082; 5,714,331; and 5,719,262, each of which is herein incorporated by reference. Further teaching of PNA compounds can be found, for example, in Nielsen et al., Science, 1991, 254, 1497-1500.

[0162] Some embodiments featured in the disclosure include RNAs with phosphorothioate backbones and oligonucleosides with heteroatom backbones, and in particular —CH₂—NH—CH₂—, —CH₂—N(CH₃)—O—CH₂— [known as a methylene (methylimino) or MMI backbone], —CH₂—O—N(CH₃)—CH₂—, —CH₂—N(CH₃)—N(CH₃)—CH₂— and —N(CH₃)—CH₂—CH₂— [wherein the native phosphodiester backbone is represented as —O—P—O—CH₂—] of the above-referenced U.S. Pat. No. 5,489,677, and the amide backbones of the above-referenced U.S. Pat. No. 5,602,240. In some embodiments, the RNAs featured herein have morpholino backbone structures of the above-referenced U.S. Pat. No. 5,034,506.

[0163] Modified RNAs may also contain one or more substituted sugar moieties. The iRNAs, e.g., dsRNAs, featured herein can include one of the following at the 2′ position: OH; F; O-, S-, or N-alkyl; O-, S-, or N-alkenyl; O-, S- or N-alkynyl; or O-alkyl-O-alkyl, wherein the alkyl, alkenyl and alkynyl may be substituted or unsubstituted C₁ to C₁₀ alkyl or C₂ to C₁₀ alkenyl and alkynyl. Exemplary suitable modifications include O[(CH₂)ₙO]ₘCH₃, O(CH₂)·ₙOCH₃, O(CH₂)ₙNH₂, O(CH₂)ₙCH₃, O(CH₂)ₙONH₂, and O(CH₂)ₙON[(CH₂)ₙCH₃)]₂, where n and m are from 1 to about 10. In other embodiments, dsRNAs include one of the following at the 2′ position: C₁ to C₁₀ lower alkyl, substituted lower alkyl, alkaryl, aralkyl, O-alkaryl or O-aralkyl, SH, SCH₃, OCN, Cl, Br, CN, CF₃, OCF₃, SOCH₃, SO₂CH₃, ONO₂, NO₂, N₃, NH₂, heterocycloalkyl, heterocycloalkaryl, aminoalkylamino, polyalkylamino, substituted silyl, an RNA cleaving group, a reporter group, an intercalator, a group for improving the pharmacokinetic properties of an iRNA, or a group for improving the pharmacodynamic properties of an iRNA, and other substituents having similar properties. In some embodiments, the modification includes a 2′-methoxyethoxy (2′-O—CH₂CH₂OCH₃, also known as 2′-O-(2-methoxyethyl) or 2′-MOE) (Martin et al., Helv. Chim. Acta, 1995, 78:486-504) i.e., an alkoxy-alkoxy group. Another exemplary modification is 2′-dimethylaminooxyethoxy, i.e., a O(CH₂)₂ON(CH₃)₂ group, also known as 2′-DMAOE, and 2′-dimethylaminoethoxyethoxy (also known in the art as 2′-O-dimethylaminoethoxyethyl or 2′-DMAEOE), i.e., 2′-O—CH₂—O—CH₂—N(CH₂)₂.

[0164] In other embodiments, an iRNA agent comprises one or more (e.g., about 1, 2, 3, 4, 5, 6, 7, 8, 9, 10, or more) acyclic nucleotides (or nucleosides). In certain embodiments, the sense strand or the antisense strand, or both sense strand and antisense strand, include less than five acyclic nucleotides per strand (e.g., four, three, two or one acyclic nucleotides per strand). The one or more acyclic nucleotides can be found, for example, in the double-stranded region, of the sense or antisense strand, or both strands; at the 5′-end, the 3′-end, both of the 5′ and 3′-ends of the sense or antisense strand, or both strands, of the iRNA agent. In some embodiments, one or more acyclic nucleotides are present at positions 1 to 8 of the sense or antisense strand, or both. In some embodiments, one or more acyclic nucleotides are found in the antisense strand at positions 4 to 10 (e.g., positions 6-8) from the 5′-end of the antisense strand. In some embodiments, the one or more acyclic nucleotides are found at one or both 3′-terminal overhangs of the iRNA agent.

[0165] The term “acyclic nucleotide” or “acyclic nucleoside” as used herein refers to any nucleotide or nucleoside having an acyclic sugar, e.g., an acyclic ribose. An exemplary acyclic nucleotide or nucleoside can include a nucleobase, e.g., a naturally-occurring or a modified nucleobase (e.g., a nucleobase as described herein). In certain embodiments, a bond between any of the ribose carbons (C1, C2, C3, C4, or C5), is independently or in combination absent from the nucleotide. In some embodiments, the bond between C2-C3 carbons of the ribose ring is absent, e.g., an acyclic 2′-3′-Seco-nucleotide monomer. In other embodiments, the bond between C1-C2, C3-C4, or C4-05 is absent (e.g., a 1′-2′, 3′-4′ or 4′-5′-seco nucleotide monomer). Exemplary acyclic nucleotides are disclosed in U.S. Pat. No. 8,314,227, incorporated herein by reference in its entirely. For example, an acyclic nucleotide can include any of monomers D-J in FIGS. 1-2 of U.S. Pat. No. 8,314,227. In some embodiments, the acyclic nucleotide includes the following monomer:

[chemical structure]

[0166] wherein Base is a nucleobase, e.g., a naturally-occurring or a modified nucleobase (e.g., a nucleobase as described herein).

[0167] In certain embodiments, the acyclic nucleotide can be modified or derivatized, e.g., by coupling the acyclic nucleotide to another moiety, e.g., a ligand (e.g., a GalNAc, a cholesterol ligand), an alkyl, a polyamine, a sugar, a polypeptide, among others.

[0168] In other embodiments, the iRNA agent includes one or more acyclic nucleotides and one or more LNAs (e.g., an LNA as described herein). For example, one or more acyclic nucleotides and/or one or more LNAs can be present in the sense strand, the antisense strand, or both. The number of acyclic nucleotides in one strand can be the same or different from the number of LNAs in the opposing strand. In certain embodiments, the sense strand and/or the antisense strand comprises less than five LNAs (e.g., four, three, two or one LNAs) located in the double stranded region or a 3′-overhang. In other embodiments, one or two LNAs are located in the double stranded region or the 3′-overhang of the sense strand. Alternatively, or in combination, the sense strand and/or antisense strand comprises less than five acyclic nucleotides (e.g., four, three, two or one acyclic nucleotides) in the double-stranded region or a 3′-overhang. In some embodiments, the sense strand of the iRNA agent comprises one or two LNAs in the 3′-overhang of the sense strand, and one or two acyclic nucleotides in the double-stranded region of the antisense strand (e.g., at positions 4 to 10 (e.g., positions 6-8) from the 5′-end of the antisense strand) of the iRNA agent.

[0169] In other embodiments, inclusion of one or more acyclic nucleotides (alone or in addition to one or more LNAs) in the iRNA agent results in one or more (or all) of: (i) a reduction in an off-target effect; (ii) a reduction in passenger strand participation in RNAi; (iii) an increase in specificity of the guide strand for its target mRNA; (iv) a reduction in a microRNA off-target effect; (v) an increase in stability; or (vi) an increase in resistance to degradation, of the iRNA molecule.

[0170] Other modifications include 2′-methoxy (2′-OCH₃), 2′-5 aminopropoxy (2′-OCH₂CH₂CH₂NH₂) and 2′-fluoro (2′-F). Similar modifications may also be made at other positions on the RNA of an iRNA, particularly the 3′ position of the sugar on the 3′ terminal nucleotide or in 2′-5′ linked dsRNAs and the 5′ position of 5′ terminal nucleotide. iRNAs may also have sugar mimetics such as cyclobutyl moieties in place of the pentofuranosyl sugar. Representative U.S. patents that teach the preparation of such modified sugar structures include, but are not limited to, U.S. Pat. Nos. 4,981,957; 5,118,800; 5,319,080; 5,359,044; 5,393,878; 5,446,137; 5,466,786; 5,514,785; 5,519,134; 5,567,811; 5,576,427; 5,591,722; 5,597,909; 5,610,300; 5,627,053; 5,639,873; 5,646,265; 5,658,873; 5,670,633; and 5,700,920, certain of which are commonly owned with the instant application, and each of which is herein incorporated by reference.

[0171] An iRNA may also include nucleobase (often referred to in the art simply as “base”) modifications or substitutions. As used herein, “unmodified” or “natural” nucleobases include the purine bases adenine (A) and guanine (G), and the pyrimidine bases thymine (T), cytosine (C) and uracil (U). Modified nucleobases include other synthetic and natural nucleobases such as 5-methylcytosine (5-me-C), 5-hydroxymethyl cytosine, xanthine, hypoxanthine, 2-aminoadenine, 6-methyl and other alkyl derivatives of adenine and guanine, 2-propyl and other alkyl derivatives of adenine and guanine, 2-thiouracil, 2-thiothymine and 2-thiocytosine, 5-halouracil and cytosine, 5-propynyl uracil and cytosine, 6-azo uracil, cytosine and thymine, 5-uracil (pseudouracil), 4-thiouracil, 8-halo, 8-amino, 8-thiol, 8-thioalkyl, 8-hydroxyl anal other 8-substituted adenines and guanines, 5-halo, particularly 5-bromo, 5-trifluoromethyl and other 5-substituted uracils and cytosines, 7-methylguanine and 7-methyladenine, 8-azaguanine and 8-azaadenine, 7-deazaguanine and 7-daazaadenine and 3-deazaguanine and 3-deazaadenine.

[0172] Further nucleobases include those disclosed in U.S. Pat. No. 3,687,808, those disclosed in Modified Nucleosides in Biochemistry, Biotechnology and Medicine, Herdewijn, P. ed. Wiley-VCH, 2008; those disclosed in The Concise Encyclopedia of Polymer Science and Engineering, pages 858-859, Kroschwitz, J. L, ed. John Wiley & Sons, 1990, these disclosed by Englisch et al., Angewandte Chemie, International Edition, 1991, 30, 613, and those disclosed by Sanghvi, Y S., Chapter 15, dsRNA Research and Applications, pages 289-302, Crooke, S. T. and Lebleu, B., Ed., CRC Press, 1993. Certain of these nucleobases are particularly useful for increasing the binding affinity of the oligomeric compounds featured in the disclosure. These include 5-substituted pyrimidines, 6-azapyrimidines and N-2, N-6 and 0-6 substituted purines, including 2-aminopropyladenine, 5-propynyluracil and 5-propynylcytosine. 5-methylcytosine substitutions have been shown to increase nucleic acid duplex stability by 0.6-1.2° C. (Sanghvi, Y. S., Crooke, S. T. and Lebleu, B., Eds., dsRNA Research and Applications, CRC Press, Boca Raton, 1993, pp. 276-278) and are exemplary base substitutions, even more particularly when combined with 2′-O-methoxyethyl sugar modifications.

[0173] Representative U.S. patents that teach the preparation of certain of the above noted modified nucleobases as well as other modified nucleobases include, but are not limited to, the above noted U.S. Pat. No. 3,687,808, as well as U.S. Pat. Nos. 4,845,205; 5,130,30; 5,134,066; 5,175,273; 5,367,066; 5,432,272; 5,457,187; 5,459,255; 5,484,908; 5,502,177; 5,525,711; 5,552,540; 5,587,469; 5,594,121, 5,596,091; 5,614,617; 5,681,941; 6,015,886; 6,147,200; 6,166,197; 6,222,025; 6,235,887; 6,380,368; 6,528,640; 6,639,062; 6,617,438; 7,045,610; 7,427,672; and 7,495,088, each of which is herein incorporated by reference, and U.S. Pat. No. 5,750,692, also herein incorporated by reference.

[0174] The RNA of an iRNA can also be modified to include one or more (e.g., about 1, 2, 3, 4, 5, 6, 7, 8, 9, 10, or more) locked nucleic acids (LNA) (also referred to herein as “locked nucleotides”). In some embodiments, a locked nucleic acid is a nucleotide having a modified ribose moiety in which the ribose moiety comprises an extra bridge connecting, e.g., the 2′ and 4′ carbons. This structure effectively “locks” the ribose in the 3′-endo structural conformation. The addition of locked nucleic acids to siRNAs has been shown to increase siRNA stability in serum, increase thermal stability, and to reduce off-target effects (Elmen, J. et al., (2005) Nucleic Acids Research 33(1):439-447; Mook, O R. et al., (2007) Mol Canc Ther 6(3):833-843; Grunweller, A. et al., (2003) Nucleic Acids Research 31(12):3185-3193).

[0175] Representative U.S. Patents that teach the preparation of locked nucleic acids include, but are not limited to, the following: U.S. Pat. Nos. 6,268,490; 6,670,461; 6,794,499; 6,998,484; 7,053,207; 7,084,125; 7,399,845, and 8,314,227, each of which is herein incorporated by reference in its entirety. Exemplary LNAs include but are not limited to, a 2′, 4′-C methylene bicyclo nucleotide (see for example Wengel et al., International PCT 5 Publication No. WO 00/66604 and WO 99/14226).

[0176] In other embodiments, the iRNA agents include one or more (e.g., about 1, 2, 3, 4, 5, 6, 7, 8, 9, 10, or more) G-clamp nucleotides. A G-clamp nucleotide is a modified cytosine analog wherein the modifications confer the ability to hydrogen bond both Watson-Crick and Hoogsteen faces of a complementary guanine within a duplex, see for example Lin and Matteucci, 1998, J. Am. Chem. Soc., 120, 8531-8532. A single G-clamp analog substitution within an oligonucleotide can result in substantially enhanced helical thermal stability and mismatch discrimination when hybridized to complementary oligonucleotides. The inclusion of such nucleotides in the iRNA molecules can result in enhanced affinity and specificity to nucleic acid targets, complementary sequences, or template strands.

[0177] Potentially stabilizing modifications to the ends of RNA molecules can include N-(acetylaminocaproyl)-4-hydroxyprolinol (Hyp-C6-NHAc), N-(caproyl-4-hydroxyprolinol (Hyp-C6), N-(acetyl-4-hydroxyprolinol (Hyp-NHAc), thymidine-2′-O-deoxythymidine (ether), N-(aminocaproyl)-4-hydroxyprolinol (Hyp-C6-amino), 2-docosanoyl-uridine-3″-phosphate, inverted base dT(idT) and others. Disclosure of this modification can be found in PCT Publication No. WO 2011/005861.

[0178] iRNA Motifs

[0179] In some embodiments, the sense strand sequence may be represented by formula (I):

5′ nₚ-Nₐ-(X X X)ᵢ-N_{b}-Y Y Y -N_{b}-(Z Z Z)ⱼ-Nₐ-n_{q} 3′
(I)

[0180] wherein:

[0181] i and j are each independently 0 or 1;

[0182] p and q are each independently 0-6;

[0183] each Nₐ independently represents an oligonucleotide sequence comprising 0-25 modified nucleotides, each sequence comprising at least two differently modified nucleotides;

[0184] each N_{b} independently represents an oligonucleotide sequence comprising 0-10 modified nucleotides;

[0185] each nₚ and n_{q} independently represent an overhang nucleotide;

[0186] wherein N_{b} and Y do not have the same modification; and

[0187] XXX, YYY and ZZZ each independently represent one motif of three identical modifications on three consecutive nucleotides. In some embodiments, YYY is all 2′-F modified nucleotides.

[0188] In some embodiments, the Nₐ and/or N_{b} comprise modifications of alternating pattern.

[0189] In some embodiments, the YYY motif occurs at or near the cleavage site of the sense strand. For example, when the RNAi agent has a duplex region of 17-23 nucleotides in length, the YYY motif can occur at or the vicinity of the cleavage site (e.g.: can occur at positions 6, 7, 8; 7, 8, 9; 8, 9, 10; 9, 10, 11; 10, 11, 12 or 11, 12, 13) of the sense strand, the count starting from the 1^{st} nucleotide, from the 5′-end; or optionally, the count starting at the 1ₛₜ paired nucleotide within the duplex region, from the 5′-end.

[0190] In some embodiments, i is 1 and j is 0, or i is 0 and j is 1, or both i and j are 1. The sense strand can therefore be represented by the following formulas:

5′ nₚ-Nₐ-YYY-N_{b}-ZZZ-Nₐ-n_{q} 3′ (Ib);
5′ nₚ-Nₐ-XXX-N_{b}-YYY-Nₐ-n_{q} 3′ (Ic);
or
5′ nₚ-Nₐ-XXX-N_{b}-YYY-N_{b}-ZZZ-Nₐ-n_{q} 3′ (Id)

[0191] When the sense strand is represented by formula (Ib), N_{b} represents an oligonucleotide sequence comprising 0-10, 0-7, 0-5, 0-4, 0-2 or 0 modified nucleotides. Each Nₐ independently can represent an oligonucleotide sequence comprising 2-20, 2-15, or 2-10 modified nucleotides.

[0192] When the sense strand is represented as formula (Ic), N_{b} represents an oligonucleotide sequence comprising 0-10, 0-7, 0-5, 0-4, 0-2 or 0 modified nucleotides. Each Nₐ can independently represent an oligonucleotide sequence comprising 2-20, 2-15, or 2-10 modified nucleotides.

[0193] When the sense strand is represented as formula (Id), each N_{b} independently represents an oligonucleotide sequence comprising 0-10, 0-7, 0-5, 0-4, 0-2 or 0 modified nucleotides. In some embodiments, N_{b} is 0, 1, 2, 3, 4, 5 or 6. Each Nₐ can independently represent an oligonucleotide sequence comprising 2-20, 2-15, or 2-10 modified nucleotides.

[0194] Each of X, Y and Z may be the same or different from each other.

[0195] In other embodiments, i is 0 and j is 0, and the sense strand may be represented by the formula:

5′ nₚ-Nₐ-YYY- Nₐ-n_{q} 3′ (Ia)

[0196] When the sense strand is represented by formula (Ia), each Nₐ independently can represent an oligonucleotide sequence comprising 2-20, 2-15, or 2-10 modified nucleotides.

[0197] In some embodiments, the antisense strand sequence of the RNAi may be represented by formula (II):

5′ n_{q}′-Nₐ′-(Z′Z′Z′)ₖ-N_{b}′-Y′Y′Y′-N_{b}′-(X′X′X′)ₗ-N′ₐ-
nₚ′ 3′ (II)

wherein:

[0198] k and l are each independently 0 or 1;

[0199] p′ and q′ are each independently 0-6;

[0200] each Nₐ′ independently represents an oligonucleotide sequence comprising 0-25 modified nucleotides, each sequence comprising at least two differently modified nucleotides;

[0201] each N_{b}′ independently represents an oligonucleotide sequence comprising 0-10 modified nucleotides;

[0202] each nₚ′ and n_{q}′ independently represent an overhang nucleotide;

[0203] wherein N_{b}′ and Y′ do not have the same modification;

[0204] and

[0205] X′X′X′, Y′Y′Y′, and Z′Z′Z′ each independently represent one of three identical modification on three consecutive nucleotides.

[0206] In some embodiments, the Nₐ′ and/or N_{b}′ comprise modification of alternating pattern.

[0207] The Y′Y′Y′ motif occurs at or near the cleavage site of the antisense strand. For example, when the RNAi agent has a duplex region of 17-23 nucleotides in length, the Y′Y′Y′ motif can occur at positions 9, 10, 11; 10, 11, 12; 11, 12, 13; 12, 13, 14; or 13, 14, 15 of the antisense strand, with the count starting from the 1^{st} nucleotide, from the 5′-end; or optionally, the count starting at the 1^{st} paired nucleotide within the duplex region, from the 5′-end. In some embodiments, the Y′Y′Y′ motif occurs at positions 11, 12, 13.

[0208] In some embodiments, Y′Y′Y′ motif is all 2′-Ome modified nucleotides.

[0209] In on embodiment, k is 1 and l is 0, or k is 0 and l is 1, or both 5 k and 1 are 1.

[0210] The antisense strand can therefore be represented by the following formulas:

5′ n_{q}′-Nₐ′-Z′Z′Z′-N_{b}′-Y′Y′Y′-Nₐ′-nₚ′ 3′ (IIb);
5′ n_{q}′-Nₐ′-Y′Y′Y′-N_{b}′-X′X′X′-nₚ 3′ (IIc);
or
5′ n_{q}′-Nₐ′-Z′Z′Z′-N_{b}′-Y′Y′Y′-N_{b}′-X′X′X′-Nₐ′-nₚ′ 3′
(IId)

[0211] When the antisense strand is represented by formula (IIb), N_{b}′ represents an oligonucleotide sequence comprising 0-10, 0-7, 0-5, 0-4, 0-2 or 0 modified nucleotides. Each Nₐ′ independently represents an oligonucleotide sequence comprising 2-20, 2-15, or 2-10 modified nucleotides.

[0212] When the antisense strand is represented as formula (IId), each N_{b}′ independently represents an oligonucleotide sequence comprising 0-10, 0-7, 0-5, 0-4, 0-2 or 0 modified nucleotides. Each Nₐ′ independently represents an oligonucleotide sequence comprising 2-20, 2-15, or 2-10 modified nucleotides. In some embodiments, N_{b} is 0, 1, 2, 3, 4, 5 or 6.

[0213] In other embodiments, k is 0 and l is 0 and the antisense strand may be represented by the formula:

5′ nₚ′-Nₐ′-Y′Y′Y′ - Nₐ′-n_{q}′ 3′ (Ia)

[0214] When the antisense strand is represented as formula (IIa), each Nₐ′ independently represents an oligonucleotide sequence comprising 2-20, 2-15, or 2-10 modified nucleotides.

[0215] Each of X′, Y′ and Z′ may be the same or different from each other.

[0216] Each nucleotide of the sense strand and antisense strand may be independently modified with LNA, HNA, CeNA, GNA, 2′-methoxyethyl, 2′-O-methyl, 2′-O-allyl, 2′-C-allyl, 2′-hydroxyl, or 2′-fluoro. For example, each nucleotide of the sense strand and antisense strand is independently modified with 2′-O-methyl or 2′-fluoro. Each X, Y, Z, X′, Y′ and Z′, in particular, may represent a 2′-O-methyl modification or a 2′-fluoro modification.

[0217] In some embodiments, the sense strand of the RNAi agent may contain YYY motif occurring at 9, 10 and 11 positions of the strand when the duplex region is 21 nt, the count starting from the 1^{st} nucleotide from the 5′-end, or optionally, the count starting at the 1^{st} paired nucleotide within the duplex region, from the 5′-end; and Y represents 2′-F modification. The sense strand may additionally contain XXX motif or ZZZ motifs as wing modifications at the opposite end of the duplex region; and XXX and ZZZ each independently represents a 2′-OMe modification or 2′-F modification.

[0218] In some embodiments the antisense strand may Y′Y′Y′ motif occurring at positions 11, 12, 13 of the strand, the count starting from the 1^{st} nucleotide from the 5′-end, or optionally, the count starting at the 1^{st} paired nucleotide within the duplex region, from the 5′-end; and Y′ represents 2′-O-methyl modification. The antisense strand may additionally contain X′X′X′ motif or Z′Z′Z′ motifs as wing modifications at the opposite end of the duplex region; and X′X′X′ and Z′Z′Z′ each independently represents a 2′-OMe modification or 2′-F modification.

[0219] The sense strand represented by any one of the above formulas (Ia), (Ib), (Ic), and (Id) forms a duplex with an antisense strand being represented by any one of formulas (IIa), (IIb), (IIc), and (IId), respectively.

[0220] Accordingly, certain RNAi agents for use in the methods of the disclosure may comprise a sense strand and an antisense strand, each strand having 14 to 30 nucleotides, the RNAi duplex represented by formula (III):

sense:
5′ nₚ -Nₐ-(XXX)ᵢ -N_{b}- YYY -N_{b} -(ZZZ)j-Nₐ-n_{q} 3′
antisense:
3′ nₚ′-Nₐ′-(X′X′X′)ₖ-N_{b}′-Y′Y′Y′-N_{b}′-(Z′Z′Z′)ᵢ-Nₐ′-
n_{q}′ 5′ (III)

[0221] wherein,

[0222] i, j, k, and 1 are each independently 0 or 1;

[0223] p, p′, q, and q′ are each independently 0-6;

[0224] each Nₐ and Nₐ′ independently represents an oligonucleotide sequence comprising 0-25 modified nucleotides, each sequence comprising at least two differently modified nucleotides;

[0225] each N_{b} and N_{b}′ independently represents an oligonucleotide sequence comprising 0-10 modified nucleotides;

[0226] wherein

[0227] each nₚ′, nₚ, n_{q}′, and n_{q}, each of which may or may not be present independently represents an overhang nucleotide; and

[0228] XXX, YYY, ZZZ, X′X′X′, Y′Y′Y′, and Z′Z′Z′ each independently represent one motif of three identical modification on three consecutive nucleotides.

[0229] In some embodiments, i is 0 and j is 0; or i is 1 and j is 0; or i is 0 and j is 1; or both i and j are 0; or both i and j are 1. In some embodiments, k is 0 and l is 0; or k is 1 and l is 0; k is 0 and l is 1; or both k and 1 are 0; or both k and 1 are 1.

[0230] Exemplary combinations of the sense strand and antisense strand forming a RNAi duplex include the formulas below:

5′ nₚ-Nₐ-Y Y Y-Nₐ-n_{q} 3′
3′ nₚ′ -Nₐ′- Y′Y′Y′-Nₐ′n_{q}′ 5′
(IIIa)
5′ nₚ -Nₐ -Y Y Y -N_{b} -Z Z Z -Nₐ-n_{q} 3′
3′ nₚ -Nₐ′- Y′Y′Y′-N′- Z′Z′Z′- Nₐ′-n_{q}′ 5′
(IIIb)
5′ nₚ -Nₐ - X X X -N_{b}- Y Y Y -Nₐ-n_{q} 3′
3′ nₚ -Nₐ′- X′X′X′ -N_{b}′- Y′Y′Y′- Nₐ′-n_{q}′ 5′
(IIIc)
5′ nₚ -Nₐ - X X X -N_{b} -Y Y Y - N_{b}- Z Z Z-Nₐ-n_{q} 3′
3′ nₚ -Nₐ′- X′X′X′-N_{b}′- Y′Y′Y′-N_{b}′- Z′Z′Z′-Nₐ′-n_{q}′
5′ (IIId)

[0231] When the RNAi agent is represented by formula (IIIa), each Nₐ independently represents an oligonucleotide sequence comprising 2-20, 2-15, or 2-10 modified nucleotides.

[0232] When the RNAi agent is represented by formula (IIIb), each N_{b} independently represents an oligonucleotide sequence comprising 1-10, 1-7, 1-5 or 1-4 modified nucleotides. Each Nₐ independently represents an oligonucleotide sequence comprising 2-20, 2-15, or 2-10 modified nucleotides.

[0233] When the RNAi agent is represented as formula (IIIc), each N_{b}, N_{b}′ independently represents an oligonucleotide sequence comprising 0-10, 0-7, 0-5, 0-4, 0-2 or 0 modified nucleotides. Each Nₐ independently represents an oligonucleotide sequence comprising 2-20, 2-15, or 2-10 modified nucleotides.

[0234] When the RNAi agent is represented as formula (IIId), each N_{b}, N_{b}′ independently represents an oligonucleotide sequence comprising 0-10, 0-7, 0-5, 0-4, 0-2 or 0 modified nucleotides. Each Nₐ, Nₐ′ independently represents an oligonucleotide sequence comprising 2-20, 2-15, or 2-10 modified nucleotides. Each of Nₐ, Nₐ′, N_{b} and N_{b}′ independently comprises modifications of alternating pattern.

[0235] Each of X, Y and Z in formulas (III), (IIIa), (IIIb), (IIIc), and (IIId) may be the same or different from each other.

[0236] When the RNAi agent is represented by formula (III), (IIIa), (IIIb), (IIIc), and (IIId), at least one of the Y nucleotides may form a base pair with one of the Y′ nucleotides. Alternatively, at least two of the Y nucleotides form base pairs with the corresponding Y′ nucleotides; or all three of the Y nucleotides all form base pairs with the corresponding Y′ nucleotides.

[0237] When the RNAi agent is represented by formula (IIIb) or (IIId), at least one of the Z nucleotides may form a base pair with one of the Z′ nucleotides. Alternatively, at least two of the Z nucleotides form base pairs with the corresponding Z′ nucleotides; or all three of the Z nucleotides all form base pairs with the corresponding Z′ nucleotides.

[0238] When the RNAi agent is represented as formula (IIIc) or (IIId), at least one of the X nucleotides may form a base pair with one of the X′ nucleotides. Alternatively, at least two of the X nucleotides form base pairs with the corresponding X′ nucleotides; or all three of the X nucleotides all form base pairs with the corresponding X′ nucleotides.

[0239] In some embodiments, the modification on the Y nucleotide is different than the modification on the Y′ nucleotide, the modification on the Z nucleotide is different than the modification on the Z′ nucleotide, and/or the modification on the X nucleotide is different than the modification on the X′ nucleotide.

[0240] In some embodiments, when the RNAi agent is represented by formula (IIId), the Nₐ modifications are 2′-O-methyl or 2′-fluoro modifications. In some embodiments, when the RNAi agent is represented by formula (IIId), the Nₐ modifications are 2′-O-methyl or 2′-fluoro modifications and nₚ′>0 and at least one nₚ′ is linked to a neighboring nucleotide a via phosphorothioate linkage. In some embodiments, when the RNAi agent is represented by formula (IIId), the Nₐ modifications are 2′-O-methyl or 2′-fluoro modifications, nₚ′>0 and at least one nₚ′ is linked to a neighboring nucleotide via phosphorothioate linkage, and the sense strand is conjugated to one or more GalNAc derivatives attached through a bivalent or trivalent branched linker. In some embodiments, when the RNAi agent is represented by formula (IIId), the Nₐ modifications are 2′-O-methyl or 2′-fluoro modifications, nₚ′>0 and at least one nₚ′ is linked to a neighboring nucleotide via phosphorothioate linkage, the sense strand comprises at least one phosphorothioate linkage, and the sense strand is conjugated to one or more GalNAc derivatives attached through a bivalent or trivalent branched linker.

[0241] In some embodiments, when the RNAi agent is represented by formula (IIIa), the Nₐ modifications are 2′-O-methyl or 2′-fluoro modifications, nₚ′>0 and at least one nₚ′ is linked to a neighboring nucleotide via phosphorothioate linkage, the sense strand comprises at least one phosphorothioate linkage, and the sense strand is conjugated to one or more GalNAc derivatives attached through a bivalent or trivalent branched linker.

[0242] In some embodiments, the RNAi agent is a multimer containing at least two duplexes represented by formula (III), (IIIa), (IIIb), (IIIc), and (IIId), wherein the duplexes are connected by a linker. The linker can be cleavable or non-cleavable. Optionally, the multimer further comprises a ligand. Each of the duplexes can target the same gene or two different genes; or each of the duplexes can target same gene at two different target sites.

[0243] In some embodiments, the RNAi agent is a multimer containing three, four, five, six or more duplexes represented by formula (III), (IIIa), (IIIb), (IIIc), and (IIId), wherein the duplexes are connected by a linker. The linker can be cleavable or non-cleavable. Optionally, the multimer further comprises a ligand. Each of the duplexes can target the same gene or two different genes; or each of the duplexes can target same gene at two different target sites.

[0244] In some embodiments, two RNAi agents represented by formula (III), (IIIa), (IIIb), (IIIc), and (IIId) are linked to each other at the 5′ end, and one or both of the 3′ ends and are optionally conjugated to a ligand. Each of the agents can target the same gene or two different genes; or each of the agents can target same gene at two different target sites.

iRNA Conjugates

[0245] The iRNA agents disclosed herein can be in the form of conjugates. The conjugate may be attached at any suitable location in the iRNA molecule, e.g., at the 3′ end or the 5′ end of the sense or the antisense strand. The conjugates are optionally attached via a linker.

[0246] In some embodiments, an iRNA agent described herein is chemically linked to one or more ligands, moieties or conjugates, which may confer functionality, e.g., by affecting (e.g., enhancing) the activity, cellular distribution or cellular uptake of the iRNA. Such moieties include but are not limited to lipid moieties such as a cholesterol moiety (Letsinger et al., Proc. Natl. Acid. Sci. USA, 1989, 86: 6553-6556), cholic acid (Manoharan et al., Biorg. Med. Chem. Let., 1994, 4:1053-1060), a thioether, e.g., beryl-S-tritylthiol (Manoharan et al., Ann. N.Y. Acad. Sci., 1992, 660:306-309; Manoharan et al., Biorg. Med. Chem. Let., 1993, 3:2765-2770), a thiocholesterol (Oberhauser et al., Nucl. Acids Res., 1992, 20:533-538), an aliphatic chain, e.g., dodecandiol or undecyl residues (Saison-Behmoaras et al., EMBO J, 1991, 10:1111-1118; Kabanov et al., FEBS Lett., 1990, 259:327-330; Svinarchuk et al., Biochimie, 1993, 75:49-54), a phospholipid, e.g., di-hexadecyl-rac-glycerol or triethyl-ammonium 1,2-di-O-hexadecyl-rac-glycero-3-phosphonate (Manoharan et al., Tetrahedron Lett., 1995, 36:3651-3654; Shea et al., Nucl. Acids Res., 1990, 18:3777-3783), a polyamine or a polyethylene glycol chain (Manoharan et al., Nucleosides & Nucleotides, 1995, 14:969-973), or adamantane acetic acid (Manoharan et al., Tetrahedron Lett., 1995, 36:3651-3654), a palmityl moiety (Mishra et al., Biochim. Biophys. Acta, 1995, 1264:229-237), or an octadecylamine or hexylamino-carbonyloxycholesterol moiety (Crooke et al., J. Pharmacol. Exp. Ther., 1996, 277:923-937).

[0247] In some embodiments, a ligand alters the distribution, targeting or lifetime of an iRNA agent into which it is incorporated. In some embodiments, a ligand provides an enhanced affinity for a selected target, e.g., molecule, cell or cell type, compartment, e.g., a cellular or organ compartment, tissue, organ or region of the body, as, e.g., compared to a species absent such a ligand. Typical ligands will not take part in duplex pairing in a duplexed nucleic acid.

[0248] Ligands can include a naturally occurring substance, such as a protein (e.g., human serum albumin (HSA), low-density lipoprotein (LDL), or globulin); carbohydrate (e.g., a dextran, pullulan, chitin, chitosan, inulin, cyclodextrin or hyaluronic acid); or a lipid. The ligand may also be a recombinant or synthetic molecule, such as a synthetic polymer, e.g., a synthetic polyamino acid. Examples of polyamino acids include polyamino acid is a polylysine (PLL), poly L-aspartic acid, poly L-glutamic acid, styrene-maleic acid anhydride copolymer, poly(L-lactide-co-glycolied) copolymer, divinyl ether-maleic anhydride copolymer, N-(2-hydroxypropyl)methacrylamide copolymer (HMPA), polyethylene glycol (PEG), polyvinyl alcohol (PVA), polyurethane, poly(2-ethylacryllic acid), N-isopropylacrylamide polymers, or polyphosphazine. Example of polyamines include: polyethylenimine, polylysine (PLL), spermine, spermidine, polyamine, pseudopeptide-polyamine, peptidomimetic polyamine, dendrimer polyamine, arginine, amidine, protamine, cationic lipid, cationic porphyrin, quaternary salt of a polyamine, or an a helical peptide.

[0249] Ligands can also include targeting groups, e.g., a cell or tissue targeting agent, e.g., a lectin, glycoprotein, lipid or protein, e.g., an antibody, that binds to a specified cell type such as a kidney cell. A targeting group can be a thyrotropin, melanotropin, lectin, glycoprotein, surfactant protein A, Mucin carbohydrate, multivalent lactose, multivalent galactose, N-acetyl-galactosamine, N-acetyl-gulucosamine multivalent mannose, multivalent fucose, glycosylated polyaminoacids, multivalent galactose, transferrin, bisphosphonate, polyglutamate, polyaspartate, a lipid, cholesterol, a steroid, bile acid, folate, vitamin B12, biotin, or an RGD peptide or RGD peptide mimetic.

[0250] In some embodiments, the ligand is a GalNAc ligand that comprises one or more N-acetylgalactosamine (GalNAc) derivatives. In some embodiments, the GalNAc ligand is used to target the iRNA to the liver (e.g., to hepatocytes). Additional description of GalNAc ligands is provided in the section titled Carbohydrate Conjugates.

[0251] Other examples of ligands include dyes, intercalating agents (e.g. acridines), cross-linkers (e.g. psoralene, mitomycin C), porphyrins (TPPC4, texaphyrin, Sapphyrin), polycyclic aromatic hydrocarbons (e.g., phenazine, dihydrophenazine), artificial endonucleases (e.g. EDTA), lipophilic molecules, e.g, cholesterol, cholic acid, adamantane acetic acid, 1-pyrene butyric acid, dihydrotestosterone, 1,3-Bis-O(hexadecyl)glycerol, geranyloxyhexyl group, hexadecylglycerol, borneol, menthol, 1,3-propanediol, heptadecyl group, palmitic acid, myristic acid, O3-(oleoyl)lithocholic acid, O3-(oleoyl)cholenic acid, dimethoxytrityl, or phenoxazine) and peptide conjugates (e.g., antennapedia peptide, Tat peptide), alkylating agents, phosphate, amino, mercapto, PEG (e.g., PEG-40K), MPEG, [MPEG]2, polyamino, alkyl, substituted alkyl, radiolabeled markers, enzymes, haptens (e.g. biotin), transport/absorption facilitators (e.g., aspirin, vitamin E, folic acid), synthetic ribonucleases (e.g., imidazole, bisimidazole, histamine, imidazole clusters, acridine-imidazole conjugates, Eu3+ complexes of tetraazamacrocycles), dinitrophenyl, HRP, or AP.

[0252] Ligands can be proteins, e.g., glycoproteins, or peptides, e.g., molecules having a specific affinity for a co-ligand, or antibodies e.g., an antibody, that binds to a specified cell type such as a cancer cell, endothelial cell, or bone cell. Ligands may also include hormones and hormone receptors. They can also include non-peptidic species, such as lipids, lectins, carbohydrates, vitamins, cofactors, multivalent lactose, multivalent galactose, N-acetyl-galactosamine, N-acetyl-glucosamine multivalent mannose, or multivalent fucose. The ligand can be, for example, a lipopolysaccharide, an activator of p38 MAP kinase, or an activator of NF-κB.

[0253] The ligand can be a substance, e.g., a drug, which can increase the uptake of the iRNA agent into the cell, for example, by disrupting the cell's cytoskeleton, e.g., by disrupting the cell's microtubules, microfilaments, and/or intermediate filaments. The drug can be, for example, taxon, vincristine, vinblastine, cytochalasin, nocodazole, japlakinolide, latrunculin A, phalloidin, swinholide A, indanocine, or myoservin.

[0254] In some embodiments, a ligand attached to an iRNA as described herein acts as a pharmacokinetic modulator (PK modulator). PK modulators include lipophiles, bile acids, steroids, phospholipid analogues, peptides, protein binding agents, PEG, vitamins etc. Exemplary PK modulators include, but are not limited to, cholesterol, fatty acids, cholic acid, lithocholic acid, dialkylglycerides, diacylglyceride, phospholipids, sphingolipids, naproxen, ibuprofen, vitamin E, biotin etc. Oligonucleotides that comprise a number of phosphorothioate linkages are also known to bind to serum protein, thus short oligonucleotides, e.g., oligonucleotides of about 5 bases, 10 bases, 15 bases or 20 bases, comprising multiple of phosphorothioate linkages in the backbone are also amenable to the present disclosure as ligands (e.g. as PK modulating ligands). In addition, aptamers that bind serum components (e.g. serum proteins) are also suitable for use as PK modulating ligands in the embodiments described herein.

[0255] Ligand-conjugated oligonucleotides of the disclosure may be synthesized by the use of an oligonucleotide that bears a pendant reactive functionality, such as that derived from the attachment of a linking molecule onto the oligonucleotide (described below). This reactive oligonucleotide may be reacted directly with commercially-available ligands, ligands that are synthesized bearing any of a variety of protecting groups, or ligands that have a linking moiety attached thereto.

[0256] The oligonucleotides used in the conjugates of the present disclosure may be conveniently and routinely made through the well-known technique of solid-phase synthesis. Equipment for such synthesis is sold by several vendors including, for example, Applied Biosystems (Foster City, Calif.). Any other means for such synthesis known in the art may additionally or alternatively be employed. It is also known to use similar techniques to prepare other oligonucleotides, such as the phosphorothioates and alkylated derivatives.

[0257] In the ligand-conjugated oligonucleotides and ligand-molecule bearing sequence-specific linked nucleosides of the present disclosure, the oligonucleotides and oligonucleosides may be assembled on a suitable DNA synthesizer utilizing standard nucleotide or nucleoside precursors, or nucleotide or nucleoside conjugate precursors that already bear the linking moiety, ligand-nucleotide or nucleoside-conjugate precursors that already bear the ligand molecule, or non-nucleoside ligand-bearing building blocks.

[0258] When using nucleotide-conjugate precursors that already bear a linking moiety, the synthesis of the sequence-specific linked nucleosides is typically completed, and the ligand molecule is then reacted with the linking moiety to form the ligand-conjugated oligonucleotide. In some embodiments, the oligonucleotides or linked nucleosides of the present disclosure are synthesized by an automated synthesizer using phosphoramidites derived from ligand-nucleoside conjugates in addition to the standard phosphoramidites and non-standard phosphoramidites that are commercially available and routinely used in oligonucleotide synthesis.

[0259] Lipid Conjugates

[0260] In some embodiments, the ligand is a lipid or lipid-based molecule. Such a lipid or lipid-based molecule can typically bind a serum protein, such as human serum albumin (HSA). An HSA binding ligand allows for distribution of the conjugate to a target tissue. For example, the target tissue can be the liver, including parenchymal cells of the liver. Other molecules that can bind HSA can also be used as ligands. For example, neproxin or aspirin can be used. A lipid or lipid-based ligand can (a) increase resistance to degradation of the conjugate, (b) increase targeting or transport into a target cell or cell membrane, and/or (c) can be used to adjust binding to a serum protein, e.g., HSA.

[0261] A lipid-based ligand can be used to modulate, e.g., control (e.g., inhibit) the binding of the conjugate to a target tissue. For example, a lipid or lipid-based ligand that binds to HSA more strongly will be less likely to be targeted to the kidney and therefore less likely to be cleared from the body. A lipid or lipid-based ligand that binds to HSA less strongly can be used to target the conjugate to the kidney.

[0262] In some embodiments, the lipid-based ligand binds HSA. For example, the ligand can bind HSA with a sufficient affinity such that distribution of the conjugate to a non-kidney tissue is enhanced. However, the affinity is typically not so strong that the HSA-ligand binding cannot be reversed.

[0263] In some embodiments, the lipid-based ligand binds HSA weakly or not at all, such that distribution of the conjugate to the kidney is enhanced. Other moieties that target to kidney cells can also be used in place of or in addition to the lipid-based ligand.

[0264] In another aspect, the ligand is a moiety, e.g., a vitamin, which is taken up by a target cell, e.g., a proliferating cell. These are particularly useful for treating disorders characterized by unwanted cell proliferation, e.g., of the malignant or non-malignant type, e.g., cancer cells. Exemplary vitamins include vitamin A, E, and K. Other exemplary vitamins include are B vitamin, e.g., folic acid, B12, riboflavin, biotin, pyridoxal or other vitamins or nutrients taken up by cancer cells. Also included are HSA and low-density lipoprotein (LDL).

[0265] Cell Permeation Agents

[0266] In another aspect, the ligand is a cell-permeation agent, such as a helical cell-permeation agent. In some embodiments, the agent is amphipathic. An exemplary agent is a peptide such as tat or antennopedia. If the agent is a peptide, it can be modified, including a peptidylmimetic, invertomers, non-peptide or pseudo-peptide linkages, and use of D-amino acids. The helical agent is typically an α-helical agent, and can have a lipophilic and a lipophobic phase.

[0267] The ligand can be a peptide or peptidomimetic. A peptidomimetic (also referred to herein as an oligopeptidomimetic) is a molecule capable of folding into a defined three-dimensional structure similar to a natural peptide. The attachment of peptide and peptidomimetics to iRNA agents can affect pharmacokinetic distribution of the iRNA, such as by enhancing cellular recognition and absorption. The peptide or peptidomimetic moiety can be about 5-50 amino acids long, e.g., about 5, 10, 15, 20, 25, 30, 35, 40, 45, or 50 amino acids long.

[0268] A peptide or peptidomimetic can be, for example, a cell permeation peptide, cationic peptide, amphipathic peptide, or hydrophobic peptide (e.g., consisting primarily of Tyr, Trp or Phe). The peptide moiety can be a dendrimer peptide, constrained peptide or crosslinked peptide. In another alternative, the peptide moiety can include a hydrophobic membrane translocation sequence (MTS). An exemplary hydrophobic MTS-containing peptide is RFGF having the amino acid sequence AAVALLPAVLLALLAP (SEQ ID NO: 3000). An RFGF analogue (e.g., amino acid sequence AALLPVLLAAP (SEQ ID NO: 3001)) containing a hydrophobic MTS can also be a targeting moiety. The peptide moiety can be a “delivery” peptide, which can carry large polar molecules including peptides, oligonucleotides, and protein across cell membranes. For example, sequences from the HIV Tat protein (GRKKRRQRRRPPQ (SEQ ID NO: 3002)) and the Drosophila Antennapedia protein (RQIKIWFQNRRMKWKK (SEQ ID NO: 3003)) have been found to be capable of functioning as delivery peptides. A peptide or peptidomimetic can be encoded by a random sequence of DNA, such as a peptide identified from a phage-display library, or one-bead-one-compound (OBOC) combinatorial library (Lam et al., Nature, 354:82-84, 1991). Typically, the peptide or peptidomimetic tethered to a dsRNA agent via an incorporated monomer unit is a cell targeting peptide such as an arginine-glycine-aspartic acid (RGD)-peptide, or RGD mimic. A peptide moiety can range in length from about 5 amino acids to about 40 amino acids. The peptide moieties can have a structural modification, such as to increase stability or direct conformational properties. Any of the structural modifications described below can be utilized.

[0269] An RGD peptide for use in the compositions and methods of the disclosure may be linear or cyclic, and may be modified, e.g., glycosylated or methylated, to facilitate targeting to a specific tissue(s). RGD-containing peptides and peptidomimetics may include D-amino acids, as well as synthetic RGD mimics. In addition to RGD, one can use other moieties that target the integrin ligand. In some embodiments, conjugates of this ligand target PECAM-1 or VEGF.

[0270] An RGD peptide moiety can be used to target a particular cell type, e.g., a tumor cell, such as an endothelial tumor cell or a breast cancer tumor cell (Zitzmann et al., Cancer Res., 62:5139-43, 2002). An RGD peptide can facilitate targeting of an dsRNA agent to tumors of a variety of other tissues, including the lung, kidney, spleen, or liver (Aoki et al., Cancer Gene Therapy 8:783-787, 2001). Typically, the RGD peptide will facilitate targeting of an iRNA agent to the kidney. The RGD peptide can be linear or cyclic, and can be modified, e.g., glycosylated or methylated to facilitate targeting to specific tissues. For example, a glycosylated RGD peptide can deliver a iRNA agent to a tumor cell expressing α_{V}β₃ (Haubner et al., Jour. Nucl. Med., 42:326-336, 2001).

[0271] A “cell permeation peptide” is capable of permeating a cell, e.g., a microbial cell, such as a bacterial or fungal cell, or a mammalian cell, such as a human cell. A microbial cell-permeating peptide can be, for example, an α-helical linear peptide (e.g., LL-37 or Ceropin P1), a disulfide bond-containing peptide (e.g., α-defensin, β-defensin or bactenecin), or a peptide containing only one or two dominating amino acids (e.g., PR-39 or indolicidin). A cell permeation peptide can also include a nuclear localization signal (NLS). For example, a cell permeation peptide can be a bipartite amphipathic peptide, such as MPG, which is derived from the fusion peptide domain of HIV-1 gp41 and the NLS of SV40 large T antigen (Simeoni et al., Nucl. Acids Res. 31:2717-2724, 2003).

[0272] Carbohydrate Conjugates

[0273] In some embodiments of the compositions and methods of the disclosure, an iRNA oligonucleotide further comprises a carbohydrate. The carbohydrate conjugated iRNA are advantageous for the in vivo delivery of nucleic acids, as well as compositions suitable for in vivo therapeutic use, as described herein. As used herein, “carbohydrate” refers to a compound which is either a carbohydrate per se made up of one or more monosaccharide units having at least 6 carbon atoms (which can be linear, branched or cyclic) with an oxygen, nitrogen or sulfur atom bonded to each carbon atom; or a compound having as a part thereof a carbohydrate moiety made up of one or more monosaccharide units each having at least six carbon atoms (which can be linear, branched or cyclic), with an oxygen, nitrogen or sulfur atom bonded to each carbon atom. Representative carbohydrates include the sugars (mono-, di-, tri- and oligosaccharides containing from about 4, 5, 6, 7, 8, or 9 monosaccharide units), and polysaccharides such as starches, glycogen, cellulose and polysaccharide gums. Specific monosaccharides include C5 and above (e.g., C5, C6, C7, or C8) sugars; di- and trisaccharides include sugars having two or three monosaccharide units (e.g., C5, C6, C7, or C8).

[0274] In some embodiments, a carbohydrate conjugate comprises a monosaccharide. In some embodiments, the monosaccharide is an N-acetylgalactosamine (GalNAc). GalNAc conjugates, which comprise one or more N-acetylgalactosamine (GalNAc) derivatives, are described, for example, in U.S. Pat. No. 8,106,022, the entire content of which is hereby incorporated herein by reference. In some embodiments, the GalNAc conjugate serves as a ligand that targets the iRNA to particular cells. In some embodiments, the GalNAc conjugate targets the iRNA to liver cells, e.g., by serving as a ligand for the asialoglycoprotein receptor of liver cells (e.g., hepatocytes).

[0275] In some embodiments, the carbohydrate conjugate comprises one or more GalNAc derivatives. The GalNAc derivatives may be attached via a linker, e.g., a bivalent or trivalent branched linker. In some embodiments the GalNAc conjugate is conjugated to the 3′ end of the sense strand. In some embodiments, the GalNAc conjugate is conjugated to the iRNA agent (e.g., to the 3′ end of the sense strand) via a linker, e.g., a linker as described herein.

[0276] In some embodiments, the GalNAc conjugate is

[chemical structure]

[0277] In some embodiments, the RNAi agent is attached to the carbohydrate conjugate via a linker as shown in the following schematic, wherein X is O or S:

[chemical structure]

[0278] In some embodiments, the RNAi agent is conjugated to L96 as defined in Table 1 and shown below:

[chemical structure]

[0279] In some embodiments, a carbohydrate conjugate for use in the compositions and methods of the disclosure is selected from the group consisting of:

[chemical structure]

[chemical structure]

[chemical structure]

[chemical structure]

[0280] Another representative carbohydrate conjugate for use in the embodiments described herein includes, but is not limited to,

[chemical structure]

[0281] (Formula XXIII), when one of X or Y is an oligonucleotide, the other is a hydrogen.

[0282] In some embodiments, the carbohydrate conjugate further comprises one or more additional ligands as described above, such as, but not limited to, a PK modulator and/or a cell permeation peptide.

[0283] In some embodiments, an iRNA of the disclosure is conjugated to a carbohydrate through a linker. Non-limiting examples of iRNA carbohydrate conjugates with linkers of the compositions and methods of the disclosure include, but are not limited to,

[chemical structure]

[chemical structure]

when one of X or Y is an oligonucleotide, the other is a hydrogen.

[0284] Thermally Destabilizing Modifications

[0285] In certain embodiments, a dsRNA molecule can be optimized for RNA interference by incorporating thermally destabilizing modifications in the seed region of the antisense strand (i.e., at positions 2-9 of the 5′-end of the antisense strand) to reduce or inhibit off-target gene silencing. It has been discovered that dsRNAs with an antisense strand comprising at least one thermally destabilizing modification of the duplex within the first 9 nucleotide positions, counting from the 5′ end, of the antisense strand have reduced off-target gene silencing activity. Accordingly, in some embodiments, the antisense strand comprises at least one (e.g., one, two, three, four, five, or more) thermally destabilizing modification of the duplex within the first 9 nucleotide positions of the 5′ region of the antisense strand. In some embodiments, one or more thermally destabilizing modification(s) of the duplex is/are located in positions 2-9, or positions 4-8, from the 5′-end of the antisense strand. In some further embodiments, the thermally destabilizing modification(s) of the duplex is/are located at position 6, 7, or 8 from the 5′-end of the antisense strand. In still some further embodiments, the thermally destabilizing modification of the duplex is located at position 7 from the 5′-end of the antisense strand. The term “thermally destabilizing modification(s)” includes modification(s) that would result with a dsRNA with a lower overall melting temperature (Tm) (e.g., a Tm with one, two, three, or four degrees lower than the Tm of the dsRNA without having such modification(s). In some embodiments, the thermally destabilizing modification of the duplex is located at position 2, 3, 4, 5, or 9 from the 5′-end of the antisense strand.

[0286] The thermally destabilizing modifications can include, but are not limited to, abasic modification; mismatch with the opposing nucleotide in the opposing strand; and sugar modification such as 2′-deoxy modification or acyclic nucleotide, e.g., unlocked nucleic acids (UNA) or glycol nucleic acid (GNA).

[0287] Exemplified abasic modifications include, but are not limited to, the following:

[chemical structure]

[0288] Wherein R=H, Me, Et or OMe; R′=H, Me, Et or OMe; R″=H, Me, Et or OMe

[chemical structure]

[0289] wherein B is a modified or unmodified nucleobase.

[0290] Exemplified sugar modifications include, but are not limited to the following:

[chemical structure]

[0291] wherein B is a modified or unmodified nucleobase.

[0292] In some embodiments the thermally destabilizing modification of the duplex is selected from the group consisting of:

[chemical structure]

[0293] wherein B is a modified or unmodified nucleobase and the asterisk on each structure represents either R, S or racemic.

[0294] The term “acyclic nucleotide” refers to any nucleotide having an acyclic ribose sugar, for example, where any of bonds between the ribose carbons (e.g., C1′-C2′, C2′-C3′, C3′-C4′, C4′-O4′, or C1′-O4′) is absent or at least one of ribose carbons or oxygen (e.g., C1′, C2′, C3′, C4′, or O4′) are independently or in combination absent from the nucleotide. In some embodiments, acyclic nucleotide is

[chemical structure]

wherein B is a modified or unmodified nucleobase, R¹ and R² independently are H, halogen, OR₃, or alkyl; and R₃ is H, alkyl, cycloalkyl, aryl, aralkyl, heteroaryl or sugar). The term “UNA” refers to unlocked acyclic nucleic acid, wherein any of the bonds of the sugar has been removed, forming an unlocked “sugar” residue. In one example, UNA also encompasses monomers with bonds between C1′-C4′ being removed (i.e. the covalent carbon-oxygen-carbon bond between the C1′ and C4′ carbons). In another example, the C2′-C3′ bond (i.e. the covalent carbon-carbon bond between the C2′ and C3′ carbons) of the sugar is removed (see Mikhailov et. al., Tetrahedron Letters, 26 (17): 2059 (1985); and Fluiter et al., Mol. Biosyst., 10: 1039 (2009), which are hereby incorporated by reference in their entirety). The acyclic derivative provides greater backbone flexibility without affecting the Watson-Crick pairings. The acyclic nucleotide can be linked via 2′-5′ or 3′-5′ linkage.

[0295] The term ‘GNA’ refers to glycol nucleic acid which is a polymer similar to DNA or RNA but differing in the composition of its “backbone” in that is composed of repeating glycerol units linked by phosphodiester bonds:

[chemical structure]

[0296] The thermally destabilizing modification of the duplex can be mismatches (i.e., noncomplementary base pairs) between the thermally destabilizing nucleotide and the opposing nucleotide in the opposite strand within the dsRNA duplex. Exemplary mismatch base pairs include G:G, G:A, G:U, G:T, A:A, A:C, C:C, C:U, C:T, U:U, T:T, U:T, or a combination thereof. Other mismatch base pairings known in the art are also amenable to the present invention. A mismatch can occur between nucleotides that are either naturally occurring nucleotides or modified nucleotides, i.e., the mismatch base pairing can occur between the nucleobases from respective nucleotides independent of the modifications on the ribose sugars of the nucleotides. In certain embodiments, the dsRNA molecule contains at least one nucleobase in the mismatch pairing that is a 2′-deoxy nucleobase; e.g., the 2′-deoxy nucleobase is in the sense strand.

[0297] In some embodiments, the thermally destabilizing modification of the duplex in the seed region of the antisense strand includes nucleotides with impaired W-C H-bonding to complementary base on the target mRNA, such as:

[chemical structure]

[chemical structure]

[0298] More examples of abasic nucleotide, acyclic nucleotide modifications (including UNA and GNA), and mismatch modifications have been described in detail in WO 2011/133876, which is herein incorporated by reference in its entirety.

[0299] The thermally destabilizing modifications may also include universal base with reduced or abolished capability to form hydrogen bonds with the opposing bases, and phosphate modifications.

[0300] In some embodiments, the thermally destabilizing modification of the duplex includes nucleotides with non-canonical bases such as, but not limited to, nucleobase modifications with impaired or completely abolished capability to form hydrogen bonds with bases in the opposite strand. These nucleobase modifications have been evaluated for destabilization of the central region of the dsRNA duplex as described in WO 2010/0011895, which is herein incorporated by reference in its entirety. Exemplary nucleobase modifications are:

[chemical structure]

[0301] In some embodiments, the thermally destabilizing modification of the duplex in the seed region of the antisense strand includes one or more α-nucleotide complementary to the base on the target mRNA, such as:

[chemical structure]

[0302] wherein R is H, OH, OCH₃, F, NH₂, NHMe, NMe₂ or O-alkyl.

[0303] Exemplary phosphate modifications known to decrease the thermal stability of dsRNA duplexes compared to natural phosphodiester linkages are:

[chemical structure]

[0304] The alkyl for the R group can be a C₁-C₆alkyl. Specific alkyls for the R group include, but are not limited to methyl, ethyl, propyl, isopropyl, butyl, pentyl and hexyl.

[0305] As the skilled artisan will recognize, in view of the functional role of nucleobases is defining specificity of a RNAi agent of the disclosure, while nucleobase modifications can be performed in the various manners as described herein, e.g., to introduce destabilizing modifications into a RNAi agent of the disclosure, e.g., for purpose of enhancing on-target effect relative to off-target effect, the range of modifications available and, in general, present upon RNAi agents of the disclosure tends to be much greater for non-nucleobase modifications, e.g., modifications to sugar groups or phosphate backbones of polyribonucleotides. Such modifications are described in greater detail in other sections of the instant disclosure and are expressly contemplated for RNAi agents of the disclosure, either possessing native nucleobases or modified nucleobases as described above or elsewhere herein.

[0306] In addition to the antisense strand comprising a thermally destabilizing modification, the dsRNA can also comprise one or more stabilizing modifications. For example, the dsRNA can comprise at least two (e.g., two, three, four, five, six, seven, eight, nine, ten, or more) stabilizing modifications. Without limitations, the stabilizing modifications all can be present in one strand. In some embodiments, both the sense and the antisense strands comprise at least two stabilizing modifications. The stabilizing modification can occur on any nucleotide of the sense strand or antisense strand. For instance, the stabilizing modification can occur on every nucleotide on the sense strand or antisense strand; each stabilizing modification can occur in an alternating pattern on the sense strand or antisense strand; or the sense strand or antisense strand comprises both stabilizing modification in an alternating pattern. The alternating pattern of the stabilizing modifications on the sense strand may be the same or different from the antisense strand, and the alternating pattern of the stabilizing modifications on the sense strand can have a shift relative to the alternating pattern of the stabilizing modifications on the antisense strand.

[0307] In some embodiments, the antisense strand comprises at least two (e.g., two, three, four, five, six, seven, eight, nine, ten, or more) stabilizing modifications. Without limitations, a stabilizing modification in the antisense strand can be present at any positions.

[0308] In some embodiments, the antisense strand comprises stabilizing modifications at positions 2, 6, 8, 9, 14, and 16 from the 5′-end. In some other embodiments, the antisense strand comprises stabilizing modifications at positions 2, 6, 14, and 16 from the 5′-end. In still some other embodiments, the antisense strand comprises stabilizing modifications at positions 2, 14, and 16 from the 5′-end.

[0309] In some embodiments, the antisense strand comprises at least one stabilizing modification adjacent to the destabilizing modification. For example, the stabilizing modification can be the nucleotide at the 5′-end or the 3′-end of the destabilizing modification, i.e., at position −1 or +1 from the position of the destabilizing modification. In some embodiments, the antisense strand comprises a stabilizing modification at each of the 5′-end and the 3′-end of the destabilizing modification, i.e., positions −1 and +1 from the position of the destabilizing modification.

[0310] In some embodiments, the antisense strand comprises at least two stabilizing modifications at the 3′-end of the destabilizing modification, i.e., at positions +1 and +2 from the position of the destabilizing modification.

[0311] In some embodiments, the sense strand comprises at least two (e.g., two, three, four, five, six, seven, eight, nine, ten or more) stabilizing modifications. Without limitations, a stabilizing modification in the sense strand can be present at any positions. In some embodiments, the sense strand comprises stabilizing modifications at positions 7, 10, and 11 from the 5′-end. In some other embodiments, the sense strand comprises stabilizing modifications at positions 7, 9, 10, and 11 from the 5′-end. In some embodiments, the sense strand comprises stabilizing modifications at positions opposite or complimentary to positions 11, 12, and 15 of the antisense strand, counting from the 5′-end of the antisense strand. In some other embodiments, the sense strand comprises stabilizing modifications at positions opposite or complimentary to positions 11, 12, 13, and 15 of the antisense strand, counting from the 5′-end of the antisense strand. In some embodiments, the sense strand comprises a block of two, three, or four stabilizing modifications.

[0312] In some embodiments, the sense strand does not comprise a stabilizing modification in position opposite or complimentary to the thermally destabilizing modification of the duplex in the antisense strand.

[0313] Exemplary thermally stabilizing modifications include, but are not limited to, 2′-fluoro modifications. Other thermally stabilizing modifications include, but are not limited to, LNA.

[0314] In some embodiments, the dsRNA of the disclosure comprises at least four (e.g., four, five, six, seven, eight, nine, ten, or more) 2′-fluoro nucleotides. Without limitations, the 2′-fluoro nucleotides all can be present in one strand. In some embodiments, both the sense and the antisense strands comprise at least two 2′-fluoro nucleotides. The 2′-fluoro modification can occur on any nucleotide of the sense strand or antisense strand. For instance, the 2′-fluoro modification can occur on every nucleotide on the sense strand or antisense strand; each 2′-fluoro modification can occur in an alternating pattern on the sense strand or antisense strand; or the sense strand or antisense strand comprises both 2′-fluoro modifications in an alternating pattern. The alternating pattern of the 2′-fluoro modifications on the sense strand may be the same or different from the antisense strand, and the alternating pattern of the 2′-fluoro modifications on the sense strand can have a shift relative to the alternating pattern of the 2′-fluoro modifications on the antisense strand.

[0315] In some embodiments, the antisense strand comprises at least two (e.g., two, three, four, five, six, seven, eight, nine, ten, or more) 2′-fluoro nucleotides. Without limitations, a 2′-fluoro modification in the antisense strand can be present at any positions. In some embodiments, the antisense comprises 2′-fluoro nucleotides at positions 2, 6, 8, 9, 14, and 16 from the 5′-end. In some other embodiments, the antisense comprises 2′-fluoro nucleotides at positions 2, 6, 14, and 16 from the 5′-end. In still some other embodiments, the antisense comprises 2′-fluoro nucleotides at positions 2, 14, and 16 from the 5′-end.

[0316] In some embodiments, the antisense strand comprises at least one 2′-fluoro nucleotide adjacent to the destabilizing modification. For example, the 2′-fluoro nucleotide can be the nucleotide at the 5′-end or the 3′-end of the destabilizing modification, i.e., at position −1 or +1 from the position of the destabilizing modification. In some embodiments, the antisense strand comprises a 2′-fluoro nucleotide at each of the 5′-end and the 3′-end of the destabilizing modification, i.e., positions −1 and +1 from the position of the destabilizing modification.

[0317] In some embodiments, the antisense strand comprises at least two 2′-fluoro nucleotides at the 3′-end of the destabilizing modification, i.e., at positions +1 and +2 from the position of the destabilizing modification.

[0318] In some embodiments, the sense strand comprises at least two (e.g., two, three, four, five, six, seven, eight, nine, ten, or more) 2′-fluoro nucleotides. Without limitations, a 2′-fluoro modification in the sense strand can be present at any positions. In some embodiments, the antisense comprises 2′-fluoro nucleotides at positions 7, 10, and 11 from the 5′-end. In some other embodiments, the sense strand comprises 2′-fluoro nucleotides at positions 7, 9, 10, and 11 from the 5′-end. In some embodiments, the sense strand comprises 2′-fluoro nucleotides at positions opposite or complimentary to positions 11, 12, and 15 of the antisense strand, counting from the 5′-end of the antisense strand. In some other embodiments, the sense strand comprises 2′-fluoro nucleotides at positions opposite or complimentary to positions 11, 12, 13, and 15 of the antisense strand, counting from the 5′-end of the antisense strand. In some embodiments, the sense strand comprises a block of two, three, or four 2′-fluoro nucleotides.

[0319] In some embodiments, the sense strand does not comprise a 2′-fluoro nucleotide in position opposite or complimentary to the thermally destabilizing modification of the duplex in the antisense strand.

[0320] In some embodiments, the dsRNA molecule of the disclosure comprises a 21 nucleotides (nt) sense strand and a 23 nucleotides (nt) antisense, wherein the antisense strand contains at least one thermally destabilizing nucleotide, where the at least one thermally destabilizing nucleotide occurs in the seed region of the antisense strand (i.e., at position 2-9 of the 5′-end of the antisense strand), wherein one end of the dsRNA is blunt, while the other end is comprises a 2 nt overhang, and wherein the dsRNA optionally further has at least one (e.g., one, two, three, four, five, six, or all seven) of the following characteristics: (i) the antisense comprises 2, 3, 4, 5, or 6 2′-fluoro modifications; (ii) the antisense comprises 1, 2, 3, 4, or 5 phosphorothioate internucleotide linkages; (iii) the sense strand is conjugated with a ligand; (iv) the sense strand comprises 2, 3, 4, or 5 2′-fluoro modifications; (v) the sense strand comprises 1, 2, 3, 4, or 5 phosphorothioate internucleotide linkages; (vi) the dsRNA comprises at least four 2′-fluoro modifications; and (vii) the dsRNA comprises a blunt end at 5′-end of the antisense strand. In some embodiments, the 2 nt overhang is at the 3′-end of the antisense.

[0321] In some embodiments, every nucleotide in the sense strand and antisense strand of the dsRNA molecule may be modified. Each nucleotide may be modified with the same or different modification which can include one or more alteration of one or both of the non-linking phosphate oxygens or of one or more of the linking phosphate oxygens; alteration of a constituent of the ribose sugar, e.g., of the 2′ hydroxyl on the ribose sugar; wholesale replacement of the phosphate moiety with “dephospho” linkers; modification or replacement of a naturally occurring base; and replacement or modification of the ribose-phosphate backbone.

[0322] As nucleic acids are polymers of subunits, many of the modifications occur at a position which is repeated within a nucleic acid, e.g., a modification of a base, or a phosphate moiety, or a non-linking 0 of a phosphate moiety. In some cases, the modification will occur at all of the subject positions in the nucleic acid but in many cases it will not. By way of example, a modification may only occur at a 3′ or 5′ terminal position, may only occur in a terminal region, e.g., at a position on a terminal nucleotide or in the last 2, 3, 4, 5, or 10 nucleotides of a strand. A modification may occur in a double strand region, a single strand region, or in both. A modification may occur only in the double strand region of an RNA or may only occur in a single strand region of an RNA. E.g., a phosphorothioate modification at a non-linking 0 position may only occur at one or both termini, may only occur in a terminal region, e.g., at a position on a terminal nucleotide or in the last 2, 3, 4, 5, or 10 nucleotides of a strand, or may occur in double strand and single strand regions, particularly at termini. The 5′ end or ends can be phosphorylated.

[0323] It may be possible, e.g., to enhance stability, to include particular bases in overhangs, or to include modified nucleotides or nucleotide surrogates, in single strand overhangs, e.g., in a 5′ or 3′ overhang, or in both. E.g., it can be desirable to include purine nucleotides in overhangs. In some embodiments all or some of the bases in a 3′ or 5′ overhang may be modified, e.g., with a modification described herein. Modifications can include, e.g., the use of modifications at the 2′ position of the ribose sugar with modifications that are known in the art, e.g., the use of deoxyribonucleotides, 2′-deoxy-2′-fluoro (2′-F) or 2′-O-methyl modified instead of the ribosugar of the nucleobase, and modifications in the phosphate group, e.g., phosphorothioate modifications. Overhangs need not be homologous with the target sequence.

[0324] In some embodiments, each residue of the sense strand and antisense strand is independently modified with LNA, HNA, CeNA, 2′-methoxyethyl, 2′-O-methyl, 2′-O-allyl, 2′-C-allyl, 2′-deoxy, or 2′-fluoro. The strands can contain more than one modification. In some embodiments, each residue of the sense strand and antisense strand is independently modified with 2′-O-methyl or 2′-fluoro. It is to be understood that these modifications are in addition to the at least one thermally destabilizing modification of the duplex present in the antisense strand.

[0325] At least two different modifications are typically present on the sense strand and antisense strand. Those two modifications may be the 2′-deoxy, 2′-O-methyl, or 2′-fluoro modifications, acyclic nucleotides or others. In some embodiments, the sense strand and antisense strand each comprises two differently modified nucleotides selected from 2′-O-methyl or 2′-deoxy. In some embodiments, each residue of the sense strand and antisense strand is independently modified with 2′-O-methyl nucleotide, 2′-deoxy nucleotide, 2′-deoxy-2′-fluoro nucleotide, 2′-O—N-methylacetamido (2′-O-NMA) nucleotide, a 2′-O-dimethylaminoethoxyethyl (2′-O-DMAEOE) nucleotide, 2′-O-aminopropyl (2′-O-AP) nucleotide, or 2′-ara-F nucleotide. Again, it is to be understood that these modifications are in addition to the at least one thermally destabilizing modification of the duplex present in the antisense strand.

[0326] In some embodiments, the dsRNA molecule of the disclosure comprises modifications of an alternating pattern, particular in the B1, B2, B3, B1′, B2′, B3′, B4′ regions. The term “alternating motif” or “alternative pattern” as used herein refers to a motif having one or more modifications, each modification occurring on alternating nucleotides of one strand. The alternating nucleotide may refer to one per every other nucleotide or one per every three nucleotides, or a similar pattern. For example, if A, B and C each represent one type of modification to the nucleotide, the alternating motif can be “ABABABABABAB . . . ,” “AABBAABBAABB . . . ,” “AABAABAABAAB . . . ,” “AAABAAABAAAB . . . ,” “AAABBBAAABBB . . . ,” or “ABCABCABCABC . . . ,” etc.

[0327] The type of modifications contained in the alternating motif may be the same or different. For example, if A, B, C, D each represent one type of modification on the nucleotide, the alternating pattern, i.e., modifications on every other nucleotide, may be the same, but each of the sense strand or antisense strand can be selected from several possibilities of modifications within the alternating motif such as “ABABAB . . . ”, “ACACAC . . . ” “BDBDBD . . . ” or “CDCDCD . . . ,” etc.

[0328] In some embodiments, the dsRNA molecule of the disclosure comprises the modification pattern for the alternating motif on the sense strand relative to the modification pattern for the alternating motif on the antisense strand is shifted. The shift may be such that the modified group of nucleotides of the sense strand corresponds to a differently modified group of nucleotides of the antisense strand and vice versa. For example, the sense strand when paired with the antisense strand in the dsRNA duplex, the alternating motif in the sense strand may start with “ABABAB” from 5′-3′ of the strand and the alternating motif in the antisense strand may start with “BABABA” from 3′-5′ of the strand within the duplex region. As another example, the alternating motif in the sense strand may start with “AABBAABB” from 5′-3′ of the strand and the alternating motif in the antisense strand may start with “BBAABBAA” from 3′-5′ of the strand within the duplex region, so that there is a complete or partial shift of the modification patterns between the sense strand and the antisense strand.

[0329] The dsRNA molecule of the disclosure may further comprise at least one phosphorothioate or methylphosphonate internucleotide linkage. The phosphorothioate or methylphosphonate internucleotide linkage modification may occur on any nucleotide of the sense strand or antisense strand or both in any position of the strand. For instance, the internucleotide linkage modification may occur on every nucleotide on the sense strand or antisense strand; each internucleotide linkage modification may occur in an alternating pattern on the sense strand or antisense strand; or the sense strand or antisense strand comprises both internucleotide linkage modifications in an alternating pattern. The alternating pattern of the internucleotide linkage modification on the sense strand may be the same or different from the antisense strand, and the alternating pattern of the internucleotide linkage modification on the sense strand may have a shift relative to the alternating pattern of the internucleotide linkage modification on the antisense strand.

[0330] In some embodiments, the dsRNA molecule comprises the phosphorothioate or methylphosphonate internucleotide linkage modification in the overhang region. For example, the overhang region comprises two nucleotides having a phosphorothioate or methylphosphonate internucleotide linkage between the two nucleotides. Internucleotide linkage modifications also may be made to link the overhang nucleotides with the terminal paired nucleotides within duplex region. For example, at least 2, 3, 4, or all the overhang nucleotides may be linked through phosphorothioate or methylphosphonate internucleotide linkage, and optionally, there may be additional phosphorothioate or methylphosphonate internucleotide linkages linking the overhang nucleotide with a paired nucleotide that is next to the overhang nucleotide. For instance, there may be at least two phosphorothioate internucleotide linkages between the terminal three nucleotides, in which two of the three nucleotides are overhang nucleotides, and the third is a paired nucleotide next to the overhang nucleotide. In some embodiments, these terminal three nucleotides may be at the 3′-end of the antisense strand.

[0331] In some embodiments, the sense strand of the dsRNA molecule comprises 1-10 blocks of two to ten phosphorothioate or methylphosphonate internucleotide linkages separated by 1, 2, 3, 4, 5, 6, 7, 8, 9, 10, 11, 12, 13, 14, 15, or 16 phosphate internucleotide linkages, wherein one of the phosphorothioate or methylphosphonate internucleotide linkages is placed at any position in the oligonucleotide sequence and the said sense strand is paired with an antisense strand comprising any combination of phosphorothioate, methylphosphonate, and phosphate internucleotide linkages or an antisense strand comprising either phosphorothioate or methylphosphonate or phosphate linkage.

[0332] In some embodiments, the antisense strand of the dsRNA molecule comprises two blocks of two phosphorothioate or methylphosphonate internucleotide linkages separated by 1, 2, 3, 4, 5, 6, 7, 8, 9, 10, 11, 12, 13, 14, 15, 16, 17, or 18 phosphate internucleotide linkages, wherein one of the phosphorothioate or methylphosphonate internucleotide linkages is placed at any position in the oligonucleotide sequence and the said antisense strand is paired with a sense strand comprising any combination of phosphorothioate, methylphosphonate, and phosphate internucleotide linkages or an antisense strand comprising either phosphorothioate or methylphosphonate or phosphate linkage.

[0333] In some embodiments, the antisense strand of the dsRNA molecule comprises two blocks of three phosphorothioate or methylphosphonate internucleotide linkages separated by 1, 2, 3, 4, 5, 6, 7, 8, 9, 10, 11, 12, 13, 14, 15, or 16 phosphate internucleotide linkages, wherein one of the phosphorothioate or methylphosphonate internucleotide linkages is placed at any position in the oligonucleotide sequence and the said antisense strand is paired with a sense strand comprising any combination of phosphorothioate, methylphosphonate, and phosphate internucleotide linkages or an antisense strand comprising either phosphorothioate or methylphosphonate or phosphate linkage.

[0334] In some embodiments, the antisense strand of the dsRNA molecule comprises two blocks of four phosphorothioate or methylphosphonate internucleotide linkages separated by 1, 2, 3, 4, 5, 6, 7, 8, 9, 10, 11, 12, 13, or 14 phosphate internucleotide linkages, wherein one of the phosphorothioate or methylphosphonate internucleotide linkages is placed at any position in the oligonucleotide sequence and the said antisense strand is paired with a sense strand comprising any combination of phosphorothioate, methylphosphonate, and phosphate internucleotide linkages or an antisense strand comprising either phosphorothioate or methylphosphonate or phosphate linkage.

[0335] In some embodiments, the antisense strand of the dsRNA molecule comprises two blocks of five phosphorothioate or methylphosphonate internucleotide linkages separated by 1, 2, 3, 4, 5, 6, 7, 8, 9, 10, 11, or 12 phosphate internucleotide linkages, wherein one of the phosphorothioate or methylphosphonate internucleotide linkages is placed at any position in the oligonucleotide sequence and the said antisense strand is paired with a sense strand comprising any combination of phosphorothioate, methylphosphonate, and phosphate internucleotide linkages or an antisense strand comprising either phosphorothioate or methylphosphonate or phosphate linkage.

[0336] In some embodiments, the antisense strand of the dsRNA molecule comprises two blocks of six phosphorothioate or methylphosphonate internucleotide linkages separated by 1, 2, 3, 4, 5, 6, 7, 8, 9, or 10 phosphate internucleotide linkages, wherein one of the phosphorothioate or methylphosphonate internucleotide linkages is placed at any position in the oligonucleotide sequence and the said antisense strand is paired with a sense strand comprising any combination of phosphorothioate, methylphosphonate, and phosphate internucleotide linkages or an antisense strand comprising either phosphorothioate or methylphosphonate or phosphate linkage.

[0337] In some embodiments, the antisense strand of the dsRNA molecule comprises two blocks of seven phosphorothioate or methylphosphonate internucleotide linkages separated by 1, 2, 3, 4, 5, 6, 7, or 8 phosphate internucleotide linkages, wherein one of the phosphorothioate or methylphosphonate internucleotide linkages is placed at any position in the oligonucleotide sequence and the said antisense strand is paired with a sense strand comprising any combination of phosphorothioate, methylphosphonate, and phosphate internucleotide linkages or an antisense strand comprising either phosphorothioate or methylphosphonate or phosphate linkage.

[0338] In some embodiments, the antisense strand of the dsRNA molecule comprises two blocks of eight phosphorothioate or methylphosphonate internucleotide linkages separated by 1, 2, 3, 4, 5, or 6 phosphate internucleotide linkages, wherein one of the phosphorothioate or methylphosphonate internucleotide linkages is placed at any position in the oligonucleotide sequence and the said antisense strand is paired with a sense strand comprising any combination of phosphorothioate, methylphosphonate, and phosphate internucleotide linkages or an antisense strand comprising either phosphorothioate or methylphosphonate or phosphate linkage.

[0339] In some embodiments, the antisense strand of the dsRNA molecule comprises two blocks of nine phosphorothioate or methylphosphonate internucleotide linkages separated by 1, 2, 3, or 4 phosphate internucleotide linkages, wherein one of the phosphorothioate or methylphosphonate internucleotide linkages is placed at any position in the oligonucleotide sequence and the said antisense strand is paired with a sense strand comprising any combination of phosphorothioate, methylphosphonate, and phosphate internucleotide linkages or an antisense strand comprising either phosphorothioate or methylphosphonate or phosphate linkage.

[0340] In some embodiments, the dsRNA molecule of the disclosure further comprises one or more phosphorothioate or methylphosphonate internucleotide linkage modification within positions 1-10 of the termini position(s) of the sense or antisense strand. For example, at least 2, 3, 4, 5, 6, 7, 8, 9, or 10 nucleotides may be linked through phosphorothioate or methylphosphonate internucleotide linkage at one end or both ends of the sense or antisense strand.

[0341] In some embodiments, the dsRNA molecule of the disclosure further comprises one or more phosphorothioate or methylphosphonate internucleotide linkage modification within positions 1-10 of the internal region of the duplex of each of the sense or antisense strand. For example, at least 2, 3, 4, 5, 6, 7, 8, 9, or 10 nucleotides may be linked through phosphorothioate methylphosphonate internucleotide linkage at position 8-16 of the duplex region counting from the 5′-end of the sense strand; the dsRNA molecule can optionally further comprise one or more phosphorothioate or methylphosphonate internucleotide linkage modification within positions 1-10 of the termini position(s).

[0342] In some embodiments, the dsRNA molecule of the disclosure further comprises one to five phosphorothioate or methylphosphonate internucleotide linkage modification(s) within position 1-5 and one to five phosphorothioate or methylphosphonate internucleotide linkage modification(s) within position 18-23 of the sense strand (counting from the 5′-end), and one to five phosphorothioate or methylphosphonate internucleotide linkage modification at positions 1 and 2 and one to five within positions 18-23 of the antisense strand (counting from the 5′-end).

[0343] In some embodiments, the dsRNA molecule of the disclosure further comprises one phosphorothioate internucleotide linkage modification within position 1-5 and one phosphorothioate or methylphosphonate internucleotide linkage modification within position 18-23 of the sense strand (counting from the 5′-end), and one phosphorothioate internucleotide linkage modification at positions 1 and 2 and two phosphorothioate or methylphosphonate internucleotide linkage modifications within positions 18-23 of the antisense strand (counting from the 5′-end).

[0344] In some embodiments, the dsRNA molecule of the disclosure further comprises two phosphorothioate internucleotide linkage modifications within position 1-5 and one phosphorothioate internucleotide linkage modification within position 18-23 of the sense strand (counting from the 5′-end), and one phosphorothioate internucleotide linkage modification at positions 1 and 2 and two phosphorothioate internucleotide linkage modifications within positions 18-23 of the antisense strand (counting from the 5′-end).

[0345] In some embodiments, the dsRNA molecule of the disclosure further comprises two phosphorothioate internucleotide linkage modifications within position 1-5 and two phosphorothioate internucleotide linkage modifications within position 18-23 of the sense strand (counting from the 5′-end), and one phosphorothioate internucleotide linkage modification at positions 1 and 2 and two phosphorothioate internucleotide linkage modifications within positions 18-23 of the antisense strand (counting from the 5′-end).

[0346] In some embodiments, the dsRNA molecule of the disclosure further comprises two phosphorothioate internucleotide linkage modifications within position 1-5 and two phosphorothioate internucleotide linkage modifications within position 18-23 of the sense strand (counting from the 5′-end), and one phosphorothioate internucleotide linkage modification at positions 1 and 2 and one phosphorothioate internucleotide linkage modification within positions 18-23 of the antisense strand (counting from the 5′-end).

[0347] In some embodiments, the dsRNA molecule of the disclosure further comprises one phosphorothioate internucleotide linkage modification within position 1-5 and one phosphorothioate internucleotide linkage modification within position 18-23 of the sense strand (counting from the 5′-end), and two phosphorothioate internucleotide linkage modifications at positions 1 and 2 and two phosphorothioate internucleotide linkage modifications within positions 18-23 of the antisense strand (counting from the 5′-end).

[0348] In some embodiments, the dsRNA molecule of the disclosure further comprises one phosphorothioate internucleotide linkage modification within position 1-5 and one within position 18-23 of the sense strand (counting from the 5′-end), and two phosphorothioate internucleotide linkage modification at positions 1 and 2 and one phosphorothioate internucleotide linkage modification within positions 18-23 of the antisense strand (counting from the 5′-end).

[0349] In some embodiments, the dsRNA molecule of the disclosure further comprises one phosphorothioate internucleotide linkage modification within position 1-5 (counting from the 5′-end) of the sense strand, and two phosphorothioate internucleotide linkage modifications at positions 1 and 2 and one phosphorothioate internucleotide linkage modification within positions 18-23 of the antisense strand (counting from the 5′-end).

[0350] In some embodiments, the dsRNA molecule of the disclosure further comprises two phosphorothioate internucleotide linkage modifications within position 1-5 (counting from the 5′-end) of the sense strand, and one phosphorothioate internucleotide linkage modification at positions 1 and 2 and two phosphorothioate internucleotide linkage modifications within positions 18-23 of the antisense strand (counting from the 5′-end).

[0351] In some embodiments, the dsRNA molecule of the disclosure further comprises two phosphorothioate internucleotide linkage modifications within position 1-5 and one within position 18-23 of the sense strand (counting from the 5′-end), and two phosphorothioate internucleotide linkage modifications at positions 1 and 2 and one phosphorothioate internucleotide linkage modification within positions 18-23 of the antisense strand (counting from the 5′-end).

[0352] In some embodiments, the dsRNA molecule of the disclosure further comprises two phosphorothioate internucleotide linkage modifications within position 1-5 and one phosphorothioate internucleotide linkage modification within position 18-23 of the sense strand (counting from the 5′-end), and two phosphorothioate internucleotide linkage modifications at positions 1 and 2 and two phosphorothioate internucleotide linkage modifications within positions 18-23 of the antisense strand (counting from the 5′-end).

[0353] In some embodiments, the dsRNA molecule of the disclosure further comprises two phosphorothioate internucleotide linkage modifications within position 1-5 and one phosphorothioate internucleotide linkage modification within position 18-23 of the sense strand (counting from the 5′-end), and one phosphorothioate internucleotide linkage modification at positions 1 and 2 and two phosphorothioate internucleotide linkage modifications within positions 18-23 of the antisense strand (counting from the 5′-end).

[0354] In some embodiments, the dsRNA molecule of the disclosure further comprises two phosphorothioate internucleotide linkage modifications at position 1 and 2, and two phosphorothioate internucleotide linkage modifications at position 20 and 21 of the sense strand (counting from the 5′-end), and one phosphorothioate internucleotide linkage modification at positions 1 and one at position 21 of the antisense strand (counting from the 5′-end).

[0355] In some embodiments, the dsRNA molecule of the disclosure further comprises one phosphorothioate internucleotide linkage modification at position 1, and one phosphorothioate internucleotide linkage modification at position 21 of the sense strand (counting from the 5′-end), and two phosphorothioate internucleotide linkage modifications at positions 1 and 2 and two phosphorothioate internucleotide linkage modifications at positions 20 and 21 the antisense strand (counting from the 5′-end).

[0356] In some embodiments, the dsRNA molecule of the disclosure further comprises two phosphorothioate internucleotide linkage modifications at position 1 and 2, and two phosphorothioate internucleotide linkage modifications at position 21 and 22 of the sense strand (counting from the 5′-end), and one phosphorothioate internucleotide linkage modification at positions 1 and one phosphorothioate internucleotide linkage modification at position 21 of the antisense strand (counting from the 5′-end).

[0357] In some embodiments, the dsRNA molecule of the disclosure further comprises one phosphorothioate internucleotide linkage modification at position 1, and one phosphorothioate internucleotide linkage modification at position 21 of the sense strand (counting from the 5′-end), and two phosphorothioate internucleotide linkage modifications at positions 1 and 2 and two phosphorothioate internucleotide linkage modifications at positions 21 and 22 the antisense strand (counting from the 5′-end).

[0358] In some embodiments, the dsRNA molecule of the disclosure further comprises two phosphorothioate internucleotide linkage modifications at position 1 and 2, and two phosphorothioate internucleotide linkage modifications at position 22 and 23 of the sense strand (counting from the 5′-end), and one phosphorothioate internucleotide linkage modification at positions 1 and one phosphorothioate internucleotide linkage modification at position 21 of the antisense strand (counting from the 5′-end).

[0359] In some embodiments, the dsRNA molecule of the disclosure further comprises one phosphorothioate internucleotide linkage modification at position 1, and one phosphorothioate internucleotide linkage modification at position 21 of the sense strand (counting from the 5′-end), and two phosphorothioate internucleotide linkage modifications at positions 1 and 2 and two phosphorothioate internucleotide linkage modifications at positions 23 and 23 the antisense strand (counting from the 5′-end).

[0360] In some embodiments, compound of the disclosure comprises a pattern of backbone chiral centers. In some embodiments, a common pattern of backbone chiral centers comprises at least 5 internucleotidic linkages in the Sp configuration. In some embodiments, a common pattern of backbone chiral centers comprises at least 6 internucleotidic linkages in the Sp configuration. In some embodiments, a common pattern of backbone chiral centers comprises at least 7 internucleotidic linkages in the Sp configuration. In some embodiments, a common pattern of backbone chiral centers comprises at least 8 internucleotidic linkages in the Sp configuration. In some embodiments, a common pattern of backbone chiral centers comprises at least 9 internucleotidic linkages in the Sp configuration. In some embodiments, a common pattern of backbone chiral centers comprises at least 10 internucleotidic linkages in the Sp configuration. In some embodiments, a common pattern of backbone chiral centers comprises at least 11 internucleotidic linkages in the Sp configuration. In some embodiments, a common pattern of backbone chiral centers comprises at least 12 internucleotidic linkages in the Sp configuration. In some embodiments, a common pattern of backbone chiral centers comprises at least 13 internucleotidic linkages in the Sp configuration. In some embodiments, a common pattern of backbone chiral centers comprises at least 14 internucleotidic linkages in the Sp configuration. In some embodiments, a common pattern of backbone chiral centers comprises at least 15 internucleotidic linkages in the Sp configuration. In some embodiments, a common pattern of backbone chiral centers comprises at least 16 internucleotidic linkages in the Sp configuration. In some embodiments, a common pattern of backbone chiral centers comprises at least 17 internucleotidic linkages in the Sp configuration. In some embodiments, a common pattern of backbone chiral centers comprises at least 18 internucleotidic linkages in the Sp configuration. In some embodiments, a common pattern of backbone chiral centers comprises at least 19 internucleotidic linkages in the Sp configuration. In some embodiments, a common pattern of backbone chiral centers comprises no more than 8 internucleotidic linkages in the Rp configuration. In some embodiments, a common pattern of backbone chiral centers comprises no more than 7 internucleotidic linkages in the Rp configuration. In some embodiments, a common pattern of backbone chiral centers comprises no more than 6 internucleotidic linkages in the Rp configuration. In some embodiments, a common pattern of backbone chiral centers comprises no more than 5 internucleotidic linkages in the Rp configuration. In some embodiments, a common pattern of backbone chiral centers comprises no more than 4 internucleotidic linkages in the Rp configuration. In some embodiments, a common pattern of backbone chiral centers comprises no more than 3 internucleotidic linkages in the Rp configuration. In some embodiments, a common pattern of backbone chiral centers comprises no more than 2 internucleotidic linkages in the Rp configuration. In some embodiments, a common pattern of backbone chiral centers comprises no more than 1 internucleotidic linkages in the Rp configuration. In some embodiments, a common pattern of backbone chiral centers comprises no more than 8 internucleotidic linkages which are not chiral (as a non-limiting example, a phosphodiester). In some embodiments, a common pattern of backbone chiral centers comprises no more than 7 internucleotidic linkages which are not chiral. In some embodiments, a common pattern of backbone chiral centers comprises no more than 6 internucleotidic linkages which are not chiral. In some embodiments, a common pattern of backbone chiral centers comprises no more than 5 internucleotidic linkages which are not chiral. In some embodiments, a common pattern of backbone chiral centers comprises no more than 4 internucleotidic linkages which are not chiral. In some embodiments, a common pattern of backbone chiral centers comprises no more than 3 internucleotidic linkages which are not chiral. In some embodiments, a common pattern of backbone chiral centers comprises no more than 2 internucleotidic linkages which are not chiral. In some embodiments, a common pattern of backbone chiral centers comprises no more than 1 internucleotidic linkages which are not chiral. In some embodiments, a common pattern of backbone chiral centers comprises at least 10 internucleotidic linkages in the Sp configuration, and no more than 8 internucleotidic linkages which are not chiral. In some embodiments, a common pattern of backbone chiral centers comprises at least 11 internucleotidic linkages in the Sp configuration, and no more than 7 internucleotidic linkages which are not chiral. In some embodiments, a common pattern of backbone chiral centers comprises at least 12 internucleotidic linkages in the Sp configuration, and no more than 6 internucleotidic linkages which are not chiral. In some embodiments, a common pattern of backbone chiral centers comprises at least 13 internucleotidic linkages in the Sp configuration, and no more than 6 internucleotidic linkages which are not chiral. In some embodiments, a common pattern of backbone chiral centers comprises at least 14 internucleotidic linkages in the Sp configuration, and no more than 5 internucleotidic linkages which are not chiral. In some embodiments, a common pattern of backbone chiral centers comprises at least 15 internucleotidic linkages in the Sp configuration, and no more than 4 internucleotidic linkages which are not chiral. In some embodiments, the internucleotidic linkages in the Sp configuration are optionally contiguous or not contiguous. In some embodiments, the internucleotidic linkages in the Rp configuration are optionally contiguous or not contiguous. In some embodiments, the internucleotidic linkages which are not chiral are optionally contiguous or not contiguous.

[0361] In some embodiments, compound of the disclosure comprises a block is a stereochemistry block. In some embodiments, a block is an Rp block in that each internucleotidic linkage of the block is Rp. In some embodiments, a 5′-block is an Rp block. In some embodiments, a 3′-block is an Rp block. In some embodiments, a block is an Sp block in that each internucleotidic linkage of the block is Sp. In some embodiments, a 5′-block is an Sp block. In some embodiments, a 3′-block is an Sp block. In some embodiments, provided oligonucleotides comprise both Rp and Sp blocks. In some embodiments, provided oligonucleotides comprise one or more Rp but no Sp blocks. In some embodiments, provided oligonucleotides comprise one or more Sp but no Rp blocks. In some embodiments, provided oligonucleotides comprise one or more PO blocks wherein each internucleotidic linkage in a natural phosphate linkage.

[0362] In some embodiments, compound of the disclosure comprises a 5′-block is an Sp block wherein each sugar moiety comprises a 2′-F modification. In some embodiments, a 5′-block is an Sp block wherein each of internucleotidic linkage is a modified internucleotidic linkage and each sugar moiety comprises a 2′-F modification. In some embodiments, a 5′-block is an Sp block wherein each of internucleotidic linkage is a phosphorothioate linkage and each sugar moiety comprises a 2′-F modification. In some embodiments, a 5′-block comprises 4 or more nucleoside units. In some embodiments, a 5′-block comprises 5 or more nucleoside units. In some embodiments, a 5′-block comprises 6 or more nucleoside units. In some embodiments, a 5′-block comprises 7 or more nucleoside units. In some embodiments, a 3′-block is an Sp block wherein each sugar moiety comprises a 2′-F modification. In some embodiments, a 3′-block is an Sp block wherein each of internucleotidic linkage is a modified internucleotidic linkage and each sugar moiety comprises a 2′-F modification. In some embodiments, a 3′-block is an Sp block wherein each of internucleotidic linkage is a phosphorothioate linkage and each sugar moiety comprises a 2′-F modification. In some embodiments, a 3′-block comprises 4 or more nucleoside units. In some embodiments, a 3′-block comprises 5 or more nucleoside units. In some embodiments, a 3′-block comprises 6 or more nucleoside units. In some embodiments, a 3′-block comprises 7 or more nucleoside units.

[0363] In some embodiments, compound of the disclosure comprises a type of nucleoside in a region or an oligonucleotide is followed by a specific type of internucleotidic linkage, e.g., natural phosphate linkage, modified internucleotidic linkage, Rp chiral internucleotidic linkage, Sp chiral internucleotidic linkage, etc. In some embodiments, A is followed by Sp. In some embodiments, A is followed by Rp. In some embodiments, A is followed by natural phosphate linkage (PO). In some embodiments, U is followed by Sp. In some embodiments, U is followed by Rp. In some embodiments, U is followed by natural phosphate linkage (PO). In some embodiments, C is followed by Sp. In some embodiments, C is followed by Rp. In some embodiments, C is followed by natural phosphate linkage (PO). In some embodiments, G is followed by Sp. In some embodiments, G is followed by Rp. In some embodiments, G is followed by natural phosphate linkage (PO). In some embodiments, C and U are followed by Sp. In some embodiments, C and U are followed by Rp. In some embodiments, C and U are followed by natural phosphate linkage (PO). In some embodiments, A and G are followed by Sp. In some embodiments, A and G are followed by Rp.

[0364] In some embodiments, the dsRNA molecule of the disclosure comprises mismatch(es) with the target, within the duplex, or combinations thereof. The mismatch can occur in the overhang region or the duplex region. The base pair can be ranked on the basis of their propensity to promote dissociation or melting (e.g., on the free energy of association or dissociation of a particular pairing, the simplest approach is to examine the pairs on an individual pair basis, though next neighbor or similar analysis can also be used). In terms of promoting dissociation: A:U is preferred over G:C; G:U is preferred over G:C; and I:C is preferred over G:C (I=inosine). Mismatches, e.g., non-canonical or other than canonical pairings (as described elsewhere herein) are preferred over canonical (A:T, A:U, G:C) pairings; and pairings which include a universal base are preferred over canonical pairings.

[0365] In some embodiments, the dsRNA molecule of the disclosure comprises at least one of the first 1, 2, 3, 4, or 5 base pairs within the duplex regions from the 5′-end of the antisense strand can be chosen independently from the group of: A:U, G:U, I:C, and mismatched pairs, e.g., non-canonical or other than canonical pairings or pairings which include a universal base, to promote the dissociation of the antisense strand at the 5′-end of the duplex.

[0366] In some embodiments, the nucleotide at the 1 position within the duplex region from the 5′-end in the antisense strand is selected from the group consisting of A, dA, dU, U, and dT. Alternatively, at least one of the first 1, 2 or 3 base pair within the duplex region from the 5′-end of the antisense strand is an AU base pair. For example, the first base pair within the duplex region from the 5′-end of the antisense strand is an AU base pair.

[0367] It was found that introducing 4′-modified or 5′-modified nucleotide to the 3′-end of a phosphodiester (PO), phosphorothioate (PS), or phosphorodithioate (PS2) linkage of a dinucleotide at any position of single stranded or double stranded oligonucleotide can exert steric effect to the internucleotide linkage and, hence, protecting or stabilizing it against nucleases.

[0368] In some embodiments, 5′-modified nucleoside is introduced at the 3′-end of a dinucleotide at any position of single stranded or double stranded siRNA. For instance, a 5′-alkylated nucleoside may be introduced at the 3′-end of a dinucleotide at any position of single stranded or double stranded siRNA. The alkyl group at the 5′ position of the ribose sugar can be racemic or chirally pure R or S isomer. An exemplary 5′-alkylated nucleoside is 5′-methyl nucleoside. The 5′-methyl can be either racemic or chirally pure R or S isomer.

[0369] In some embodiments, 4′-modified nucleoside is introduced at the 3′-end of a dinucleotide at any position of single stranded or double stranded siRNA. For instance, a 4′-alkylated nucleoside may be introduced at the 3′-end of a dinucleotide at any position of single stranded or double stranded siRNA. The alkyl group at the 4′ position of the ribose sugar can be racemic or chirally pure R or S isomer. An exemplary 4′-alkylated nucleoside is 4′-methyl nucleoside. The 4′-methyl can be either racemic or chirally pure R or S isomer. Alternatively, a 4′-O-alkylated nucleoside may be introduced at the 3′-end of a dinucleotide at any position of single stranded or double stranded siRNA. The 4′-O-alkyl of the ribose sugar can be racemic or chirally pure R or S isomer. An exemplary 4′-O-alkylated nucleoside is 4′-O-methyl nucleoside. The 4′-O-methyl can be either racemic or chirally pure R or S isomer.

[0370] In some embodiments, 5′-alkylated nucleoside is introduced at any position on the sense strand or antisense strand of a dsRNA, and such modification maintains or improves potency of the dsRNA. The 5′-alkyl can be either racemic or chirally pure R or S isomer. An exemplary 5′-alkylated nucleoside is 5′-methyl nucleoside. The 5′-methyl can be either racemic or chirally pure R or S isomer.

[0371] In some embodiments, 4′-alkylated nucleoside is introduced at any position on the sense strand or antisense strand of a dsRNA, and such modification maintains or improves potency of the dsRNA. The 4′-alkyl can be either racemic or chirally pure R or S isomer. An exemplary 4′-alkylated nucleoside is 4′-methyl nucleoside. The 4′-methyl can be either racemic or chirally pure R or S isomer.

[0372] In some embodiments, 4′-O-alkylated nucleoside is introduced at any position on the sense strand or antisense strand of a dsRNA, and such modification maintains or improves potency of the dsRNA. The 5′-alkyl can be either racemic or chirally pure R or S isomer. An exemplary 4′-O-alkylated nucleoside is 4′-O-methyl nucleoside. The 4′-O-methyl can be either racemic or chirally pure R or S isomer.

[0373] In some embodiments, the dsRNA molecule of the disclosure can comprise 2′-5′ linkages (with 2′-H, 2′-OH, and 2′-OMe and with P═O or P═S). For example, the 2′-5′ linkages modifications can be used to promote nuclease resistance or to inhibit binding of the sense to the antisense strand, or can be used at the 5′ end of the sense strand to avoid sense strand activation by RISC.

[0374] In other embodiments, the dsRNA molecule of the disclosure can comprise L sugars (e.g., L ribose, L-arabinose with 2′-H, 2′-OH and 2′-OMe). For example, these L sugars modifications can be used to promote nuclease resistance or to inhibit binding of the sense to the antisense strand, or can be used at the 5′ end of the sense strand to avoid sense strand activation by RISC.

[0375] Various publications describe multimeric siRNA which can all be used with the dsRNA of the disclosure. Such publications include WO2007/091269, U.S. Pat. No. 7,858,769, WO2010/141511, WO2007/117686, WO2009/014887, and WO2011/031520 which are hereby incorporated by their entirely.

[0376] In some embodiments dsRNA molecules of the disclosure are 5′ phosphorylated or include a phosphoryl analog at the 5′ prime terminus. 5′-phosphate modifications include those which are compatible with RISC mediated gene silencing. Suitable modifications include: 5′-monophosphate ((HO)₂(O)P—O-5′); 5′-diphosphate ((HO)₂(O)P—O—P(HO)(O)—O-5′); 5′-triphosphate ((HO)₂(O)P—O—(HO)(O)P—O—P(HO)(O)—O-5′); 5′-guanosine cap (7-methylated or non-methylated) (7m-G-O-5′-(HO)(O)P—O—(HO)(O)P—O—P(HO)(O)—O-5′); 5′-adenosine cap (Appp), and any modified or unmodified nucleotide cap structure (N—O-5′-(HO)(0)P—O—(HO)(O)P—O—P(HO)(O)—O-5′); 5′-monothiophosphate (phosphorothioate; (HO)₂(S)P—O-5′); 5′-monodithiophosphate (phosphorodithioate; (HO)(HS)(S)P—O-5′), 5′-phosphorothiolate ((HO)2(O)P—S-5′); any additional combination of oxygen/sulfur replaced monophosphate, diphosphate and triphosphates (e.g. 5′-alpha-thiotriphosphate, 5′-gamma-thiotriphosphate, etc.), 5′-phosphoramidates ((HO)₂(O)P—NH-5′, (HO)(NH₂)(O)P—O-5′), 5′-alkylphosphonates (R=alkyl=methyl, ethyl, isopropyl, propyl, etc., e.g. RP(OH)(O)—O-5′-, 5′-alkenylphosphonates (i.e. vinyl, substituted vinyl), (OH)₂(O)P-5′-CH₂—), 5′-alkyletherphosphonates (R=alkylether=methoxymethyl (MeOCH2-), ethoxymethyl, etc., e.g. RP(OH)(O)—O-5′-). In one example, the modification can in placed in the antisense strand of a dsRNA molecule.

[0377] Linkers

[0378] In some embodiments, the conjugate or ligand described herein can be attached to an iRNA oligonucleotide with various linkers that can be cleavable or non-cleavable.

[0379] Linkers typically comprise a direct bond or an atom such as oxygen or sulfur, a unit such as NR8, C(O), C(O)NH, SO, SO₂, SO₂NH or a chain of atoms, such as, but not limited to, substituted or unsubstituted alkyl, substituted or unsubstituted alkenyl, substituted or unsubstituted alkynyl, arylalkyl, arylalkenyl, arylalkynyl, heteroarylalkyl, heteroarylalkenyl, heteroarylalkynyl, heterocyclylalkyl, heterocyclylalkenyl, heterocyclylalkynyl, aryl, heteroaryl, heterocyclyl, cycloalkyl, cycloalkenyl, alkylarylalkyl, alkylarylalkenyl, alkylarylalkynyl, alkenylarylalkyl, alkenylarylalkenyl, alkenylarylalkynyl, alkynylarylalkyl, alkynylarylalkenyl, alkynylarylalkynyl, alkylheteroarylalkyl, alkylheteroarylalkenyl, alkylheteroarylalkynyl, alkenylheteroarylalkyl, alkenylheteroarylalkenyl, alkenylheteroarylalkynyl, alkynylheteroarylalkyl, alkynylheteroarylalkenyl, alkynylheteroarylalkynyl, alkylheterocyclylalkyl, alkylheterocyclylalkenyl, alkylhererocyclylalkynyl, alkenylheterocyclylalkyl, alkenylheterocyclylalkenyl, alkenylheterocyclylalkynyl, alkynylheterocyclylalkyl, alkynylheterocyclylalkenyl, alkynylheterocyclylalkynyl, alkylaryl, alkenylaryl, alkynylaryl, alkylheteroaryl, alkenylheteroaryl, alkynylhereroaryl, which one or more methylenes can be interrupted or terminated by O, S, S(O), SO₂, N(R8), C(O), substituted or unsubstituted aryl, substituted or unsubstituted heteroaryl, substituted or unsubstituted heterocyclic; where R8 is hydrogen, acyl, aliphatic or substituted aliphatic. In some embodiments, the linker is between about 1-24 atoms, 2-24, 3-24, 4-24, 5-24, 6-24, 6-18, 7-18, 8-18 atoms, 7-17, 8-17, 6-16, 7-16, or 8-16 atoms.

[0380] In some embodiments, a dsRNA of the disclosure is conjugated to a bivalent or trivalent branched linker selected from the group of structures shown in any of formula (XXXI)-(XXXIV):

[chemical structure]

[0381] wherein:

[0382] q2A, q2B, q3A, q3B, q4A, q4B, q5A, q5B and q5C represent independently for each occurrence 0-20 and wherein the repeating unit can be the same or different;

[0383] P^{2A}, P^{2B}, P^{3A}, P^{3B}, P^{4A}, P^{4B}, P^{5A}, P^{5B}, P^{5C}, T^{2A}, T^{2B}, T^{3A}, T^{3B}, T^{4A}, T^{4B}, T^{4A}, T^{5B}, T^{5C} are each independently for each occurrence absent, CO, NH, O, S, OC(O), NHC(O), CH₂, CH₂NH or CH₂O;

[0384] Q^{2A}, Q^{2B}, Q^{3A}, Q^{3B}, Q^{4A}, Q^{4B}, Q^{5A}, Q^{5B}, Q^{5C} are independently for each occurrence absent, alkylene, substituted alkylene wherein one or more methylenes can be interrupted or terminated by one or more of O, S, S(O), SO₂, N(R^{N}), C(R′)═C(R″), C≡C or C(O);

[0385] R^{2A}, R^{2B}, R^{3A}, R^{3B}, R^{4A}, R^{4B}, R^{5A}, R^{5B}, R^{5C} are each independently for each occurrence absent, NH, O, S, CH₂, C(O)O, C(O)NH, NHCH(R^{a})C(O), —C(O)—CH(R^{a})—NH—, CO, CH═N—O,

[chemical structure]

or heterocyclyl;

[0386] L^{2A}, L^{2B}, L^{3A}, L^{3B}, L^{4A}, L^{4B}, L^{5A}, L^{5B} and L^{5C} represent the ligand; i.e. each independently for each occurrence a monosaccharide (such as GalNAc), disaccharide, trisaccharide, tetrasaccharide, oligosaccharide, or polysaccharide; and R^{a} is H or amino acid side chain. Trivalent conjugating GalNAc derivatives are particularly useful for use with RNAi agents for inhibiting the expression of a target gene, such as those of formula (XXXV):

[chemical structure]

[0387] wherein L^{5A}, L^{5B} and L^{5C} represent a monosaccharide, such as GalNAc derivative.

[0388] Examples of suitable bivalent and trivalent branched linker groups conjugating GalNAc derivatives include, but are not limited to, the structures recited above as formulas II, VII, XI, X, and XIII.

[0389] A cleavable linking group is one which is sufficiently stable outside the cell, but which upon entry into a target cell is cleaved to release the two parts the linker is holding together. In a some embodiments, the cleavable linking group is cleaved at least about 10 times, 20, times, 30 times, 40 times, 50 times, 60 times, 70 times, 80 times, 90 times or more, or at least about 100 times faster in a target cell or under a first reference condition (which can, e.g., be selected to mimic or represent intracellular conditions) than in the blood of a subject, or under a second reference condition (which can, e.g., be selected to mimic or represent conditions found in the blood or serum).

[0390] Cleavable linking groups are susceptible to cleavage agents, e.g., pH, redox potential or the presence of degradative molecules. Generally, cleavage agents are more prevalent or found at higher levels or activities inside cells than in serum or blood. Examples of such degradative agents include: redox agents which are selected for particular substrates or which have no substrate specificity, including, e.g., oxidative or reductive enzymes or reductive agents such as mercaptans, present in cells, that can degrade a redox cleavable linking group by reduction; esterases; endosomes or agents that can create an acidic environment, e.g., those that result in a pH of five or lower; enzymes that can hydrolyze or degrade an acid cleavable linking group by acting as a general acid, peptidases (which can be substrate specific), and phosphatases.

[0391] A cleavable linkage group, such as a disulfide bond can be susceptible to pH. The pH of human serum is 7.4, while the average intracellular pH is slightly lower, ranging from about 7.1-7.3. Endosomes have a more acidic pH, in the range of 5.5-6.0, and lysosomes have an even more acidic pH at around 5.0. Some linkers will have a cleavable linking group that is cleaved at a suitable pH, thereby releasing a cationic lipid from the ligand inside the cell, or into the desired compartment of the cell.

[0392] A linker can include a cleavable linking group that is cleavable by a particular enzyme. The type of cleavable linking group incorporated into a linker can depend on the cell to be targeted. For example, a liver-targeting ligand can be linked to a cationic lipid through a linker that includes an ester group. Liver cells are rich in esterases, and therefore the linker will be cleaved more efficiently in liver cells than in cell types that are not esterase-rich. Other cell-types rich in esterases include cells of the lung, renal cortex, and testis.

[0393] Linkers that contain peptide bonds can be used when targeting cell types rich in peptidases, such as liver cells and synoviocytes.

[0394] In general, the suitability of a candidate cleavable linking group can be evaluated by testing the ability of a degradative agent (or condition) to cleave the candidate linking group. It will also be desirable to also test the candidate cleavable linking group for the ability to resist cleavage in the blood or when in contact with other non-target tissue. Thus, one can determine the relative susceptibility to cleavage between a first and a second condition, where the first is selected to be indicative of cleavage in a target cell and the second is selected to be indicative of cleavage in other tissues or biological fluids, e.g., blood or serum. The evaluations can be carried out in cell free systems, in cells, in cell culture, in organ or tissue culture, or in whole animals. It can be useful to make initial evaluations in cell-free or culture conditions and to confirm by further evaluations in whole animals. In some embodiments, useful candidate compounds are cleaved at least about 2, 4, 10, 20, 30, 40, 50, 60, 70, 80, 90, or about 100 times faster in the cell (or under in vitro conditions selected to mimic intracellular conditions) as compared to blood or serum (or under in vitro conditions selected to mimic extracellular conditions).

[0395] Redox Cleavable Linking Groups

[0396] In some embodiments, a cleavable linking group is a redox cleavable linking group that is cleaved upon reduction or oxidation. An example of reductively cleavable linking group is a disulphide linking group (—S—S—). To determine if a candidate cleavable linking group is a suitable “reductively cleavable linking group,” or for example is suitable for use with a particular iRNA moiety and particular targeting agent one can look to methods described herein. For example, a candidate can be evaluated by incubation with dithiothreitol (DTT), or other reducing agent using reagents know in the art, which mimic the rate of cleavage which would be observed in a cell, e.g., a target cell. The candidates can also be evaluated under conditions which are selected to mimic blood or serum conditions. In one, candidate compounds are cleaved by at most about 10% in the blood. In other embodiments, useful candidate compounds are degraded at least about 2, 4, 10, 20, 30, 40, 50, 60, 70, 80, 90, or about 100 times faster in the cell (or under in vitro conditions selected to mimic intracellular conditions) as compared to blood (or under in vitro conditions selected to mimic extracellular conditions). The rate of cleavage of candidate compounds can be determined using standard enzyme kinetics assays under conditions chosen to mimic intracellular media and compared to conditions chosen to mimic extracellular media.

[0397] Phosphate-Based Cleavable Linking Groups

[0398] In some embodiments, a cleavable linker comprises a phosphate-based cleavable linking group. A phosphate-based cleavable linking group is cleaved by agents that degrade or hydrolyze the phosphate group. An example of an agent that cleaves phosphate groups in cells are enzymes such as phosphatases in cells. Examples of phosphate-based linking groups are —O—P(O)(ORk)-O—, —O—P(S)(ORk)-O—, —O—P(S)(SRk)-O—, —S—P(O)(ORk)-O—, —O—P(O)(ORk)-S—, —S—P(O)(ORk)-S—, —O—P(S)(ORk)-S—, —S—P(S)(ORk)-O—, —O—P(O)(Rk)-O—, —O—P(S)(Rk)-O—, —S—P(O)(Rk)-O—, —S—P(S)(Rk)-O—, —S—P(O)(Rk)-S—, —O—P(S)(Rk)-S—. In some embodiments, phosphate-based linking groups are —O—P(O)(OH)—O—, —O—P(S)(OH)—O—, —O—P(S)(SH)—O—, —S—P(O)(OH)—O—, —O—P(O)(OH)—S—, —S—P(O)(OH)—S—, —O—P(S)(OH)—S—, —S—P(S)(OH)—O—, —O—P(O)(H)—O—, —O—P(S)(H)—O—, —S—P(O)(H)—O, —S—P(S)(H)—O—, —S—P(O)(H)—S—, —O—P(S)(H)—S—. In some embodiments, a phosphate-based linking group is —O—P(O)(OH)—O—. These candidates can be evaluated using methods analogous to those described above.

[0399] Acid Cleavable Linking Groups

[0400] In some embodiments, a cleavable linker comprises an acid cleavable linking group. An acid cleavable linking group is a linking group that is cleaved under acidic conditions. In some embodiments acid cleavable linking groups are cleaved in an acidic environment with a pH of about 6.5 or lower (e.g., about 6.0, 5.75, 5.5, 5.25, 5.0, or lower), or by agents such as enzymes that can act as a general acid. In a cell, specific low pH organelles, such as endosomes and lysosomes can provide a cleaving environment for acid cleavable linking groups. Examples of acid cleavable linking groups include but are not limited to hydrazones, esters, and esters of amino acids. Acid cleavable groups can have the general formula —C═NN—, C(O)O, or —OC(O). In some embodiments, the carbon attached to the oxygen of the ester (the alkoxy group) is an aryl group, substituted alkyl group, or tertiary alkyl group such as dimethyl pentyl or t-butyl. These candidates can be evaluated using methods analogous to those described above.

[0401] Ester-Based Cleavable Linking Groups

[0402] In some embodiments, a cleavable linker comprises an ester-based cleavable linking group. An ester-based cleavable linking group is cleaved by enzymes such as esterases and amidases in cells. Examples of ester-based cleavable linking groups include but are not limited to esters of alkylene, alkenylene and alkynylene groups. Ester cleavable linking groups have the general formula —C(O)O—, or —OC(O)—. These candidates can be evaluated using methods analogous to those described above.

[0403] Peptide-Based Cleavable Linking Groups

[0404] In some embodiments, a cleavable linker comprises a peptide-based cleavable linking group. A peptide-based cleavable linking group is cleaved by enzymes such as peptidases and proteases in cells. Peptide-based cleavable linking groups are peptide bonds formed between amino acids to yield oligopeptides (e.g., dipeptides, tripeptides etc.) and polypeptides. Peptide-based cleavable groups do not include the amide group (—C(O)NH—). The amide group can be formed between any alkylene, alkenylene or alkynelene. A peptide bond is a special type of amide bond formed between amino acids to yield peptides and proteins. The peptide-based cleavage group is generally limited to the peptide bond (i.e., the amide bond) formed between amino acids yielding peptides and proteins and does not include the entire amide functional group. Peptide-based cleavable linking groups have the general formula —NHCHRAC(O)NHCHRBC(O)—, where RA and RB are the R groups of the two adjacent amino acids. These candidates can be evaluated using methods analogous to those described above. Representative U.S. patents that teach the preparation of RNA conjugates include, but are not limited to, U.S. Pat. Nos. 4,828,979; 4,948,882; 5,218,105; 5,525,465; 5,541,313; 5,545,730; 5,552,538; 5,578,717, 5,580,731; 5,591,584; 5,109,124; 5,118,802; 5,138,045; 5,414,077; 5,486,603; 5,512,439; 5,578,718; 5,608,046; 4,587,044; 4,605,735; 4,667,025; 4,762,779; 4,789,737; 4,824,941; 4,835,263; 4,876,335; 4,904,582; 4,958,013; 5,082,830; 5,112,963; 5,214,136; 5,082,830; 5,112,963; 5,214,136; 5,245,022; 5,254,469; 5,258,506; 5,262,536; 5,272,250; 5,292,873; 5,317,098; 5,371,241, 5,391,723; 5,416,203, 5,451,463; 5,510,475; 5,512,667; 5,514,785; 5,565,552; 5,567,810; 5,574,142; 5,585,481; 5,587,371; 5,595,726; 5,597,696; 5,599,923; 5,599,928 and 5,688,941; 6,294,664; 6,320,017; 6,576,752; 6,783,931; 6,900,297; 7,037,646; 8,106,022, the entire contents of each of which is herein incorporated by reference.

[0405] It is not necessary for all positions in a given compound to be uniformly modified, and in fact more than one of the aforementioned modifications may be incorporated in a single compound or even at a single nucleoside within an iRNA. The present disclosure also includes iRNA compounds that are chimeric compounds.

[0406] “Chimeric” iRNA compounds, or “chimeras,” in the context of the present disclosure, are iRNA compounds, e.g., dsRNAs, that contain two or more chemically distinct regions, each made up of at least one monomer unit, i.e., a nucleotide in the case of a dsRNA compound. These iRNAs typically contain at least one region wherein the RNA is modified so as to confer upon the iRNA increased resistance to nuclease degradation, increased cellular uptake, and/or increased binding affinity for the target nucleic acid. An additional region of the iRNA may serve as a substrate for enzymes capable of cleaving RNA:DNA or RNA:RNA hybrids. By way of example, RNase H is a cellular endonuclease which cleaves the RNA strand of an RNA:DNA duplex. Activation of RNase H, therefore, results in cleavage of the RNA target, thereby greatly enhancing the efficiency of iRNA inhibition of gene expression. Consequently, comparable results can often be obtained with shorter iRNAs when chimeric dsRNAs are used, compared to phosphorothioate deoxy dsRNAs hybridizing to the same target region. Cleavage of the RNA target can be routinely detected by gel electrophoresis and, if necessary, associated nucleic acid hybridization techniques known in the art.

[0407] In certain instances, the RNA of an iRNA can be modified by a non-ligand group. A number of non-ligand molecules have been conjugated to iRNAs in order to enhance the activity, cellular distribution or cellular uptake of the iRNA, and procedures for performing such conjugations are available in the scientific literature. Such non-ligand moieties have included lipid moieties, such as cholesterol (Kubo, T. et al., Biochem. Biophys. Res. Comm., 2007, 365(1):54-61; Letsinger et al., Proc. Natl. Acad. Sci. USA, 1989, 86:6553), cholic acid (Manoharan et al., Bioorg. Med. Chem. Lett., 1994, 4:1053), a thioether, e.g., hexyl-S-tritylthiol (Manoharan et al., Ann. N.Y. Acad. Sci., 1992, 660:306; Manoharan et al., Bioorg. Med. Chem. Let., 1993, 3:2765), a thiocholesterol (Oberhauser et al., Nucl. Acids Res., 1992, 20:533), an aliphatic chain, e.g., dodecandiol or undecyl residues (Saison-Behmoaras et al., EMBO J., 1991, 10:111; Kabanov et al., FEBS Lett., 1990, 259:327; Svinarchuk et al., Biochimie, 1993, 75:49), a phospholipid, e.g., di-hexadecyl-rac-glycerol or triethylammonium 1,2-di-O-hexadecyl-rac-glycero-3-H-phosphonate (Manoharan et al., Tetrahedron Lett., 1995, 36:3651; Shea et al., Nucl. Acids Res., 1990, 18:3777), a polyamine or a polyethylene glycol chain (Manoharan et al., Nucleosides & Nucleotides, 1995, 14:969), or adamantane acetic acid (Manoharan et al., Tetrahedron Lett., 1995, 36:3651), a palmityl moiety (Mishra et al., Biochim. Biophys. Acta, 1995, 1264:229), or an octadecylamine or hexylamino-carbonyl-oxycholesterol moiety (Crooke et al., J. Pharmacol. Exp. Ther., 1996, 277:923). Representative United States patents that teach the preparation of such RNA conjugates have been listed above. Typical conjugation protocols involve the synthesis of an RNAs bearing an aminolinker at one or more positions of the sequence. The amino group is then reacted with the molecule being conjugated using appropriate coupling or activating reagents. The conjugation reaction may be performed either with the RNA still bound to the solid support or following cleavage of the RNA, in solution phase. Purification of the RNA conjugate by HPLC typically affords the pure conjugate.

[0408] Delivery of iRNA

[0409] The delivery of an iRNA to a subject in need thereof can be achieved in a number of different ways. In vivo delivery can be performed directly by administering a composition comprising an iRNA, e.g. a dsRNA, to a subject. Alternatively, delivery can be performed indirectly by administering one or more vectors that encode and direct the expression of the iRNA. These alternatives are discussed further below.

[0410] Direct Delivery

[0411] In general, any method of delivering a nucleic acid molecule can be adapted for use with an iRNA (see e.g., Akhtar S. and Julian R L. (1992) Trends Cell. Biol. 2(5):139-144 and WO94/02595, which are incorporated herein by reference in their entireties). However, there are three factors that are important to consider in order to successfully deliver an iRNA molecule in vivo: (a) biological stability of the delivered molecule, (2) preventing non-specific effects, and (3) accumulation of the delivered molecule in the target tissue. The non-specific effects of an iRNA can be minimized by local administration, for example by direct injection or implantation into a tissue (as a non-limiting example, a tumor) or topically administering the preparation. Local administration to a treatment site maximizes local concentration of the agent, limits the exposure of the agent to systemic tissues that may otherwise be harmed by the agent or that may degrade the agent, and permits a lower total dose of the iRNA molecule to be administered. Several studies have shown successful knockdown of gene products when an iRNA is administered locally. For example, intraocular delivery of a VEGF dsRNA by intravitreal injection in cynomolgus monkeys (Tolentino, M J., et al (2004) Retina 24:132-138) and subretinal injections in mice (Reich, S J., et al (2003) Mol. Vis. 9:210-216) were both shown to prevent neovascularization in an experimental model of age-related macular degeneration. In addition, direct intratumoral injection of a dsRNA in mice reduces tumor volume (Pille, J., et al (2005) Mol. Ther. 11:267-274) and can prolong survival of tumor-bearing mice (Kim, W J., et al (2006) Mol. Ther. 14:343-350; Li, S., et al (2007) Mol. Ther. 15:515-523). RNA interference has also shown success with local delivery to the CNS by direct injection (Dorn, G., et al. (2004) Nucleic Acids 32:e49; Tan, P H., et al (2005) Gene Ther. 12:59-66; Makimura, H., et al (2002) BMC Neurosci. 3:18; Shishkina, G T., et al (2004) Neuroscience 129:521-528; Thakker, E R., et al (2004) Proc. Natl. Acad. Sci. U.S.A. 101:17270-17275; Akaneya, Y., et al (2005) J. Neurophysiol. 93:594-602) and to the lungs by intranasal administration (Howard, K A., et al (2006) Mol. Ther. 14:476-484; Zhang, X., et al (2004) J. Biol. Chem. 279:10677-10684; Bitko, V., et al (2005) Nat. Med. 11:50-55). For administering an iRNA systemically for the treatment of a disease, the RNA can be modified or alternatively delivered using a drug delivery system; both methods act to prevent the rapid degradation of the dsRNA by endo- and exo-nucleases in vivo.

[0412] Modification of the RNA or the pharmaceutical carrier can also permit targeting of the iRNA composition to the target tissue and avoid undesirable off-target effects. iRNA molecules can be modified by chemical conjugation to other groups, e.g., a lipid or carbohydrate group as described herein. Such conjugates can be used to target iRNA to particular cells, e.g., liver cells, e.g., hepatocytes. For example, GalNAc conjugates or lipid (e.g., LNP) formulations can be used to target iRNA to particular cells, e.g., liver cells, e.g., hepatocytes.

[0413] Lipophilic groups such as cholesterol to enhance cellular uptake and prevent degradation. For example, an iRNA directed against ApoB conjugated to a lipophilic cholesterol moiety was injected systemically into mice and resulted in knockdown of apoB mRNA in both the liver and jejunum (Soutschek, J., et al (2004) Nature 432:173-178). Conjugation of an iRNA to an aptamer has been shown to inhibit tumor growth and mediate tumor regression in a mouse model of prostate cancer (McNamara, J O., et al (2006) Nat. Biotechnol. 24:1005-1015). In an alternative embodiment, the iRNA can be delivered using drug delivery systems such as a nanoparticle, a dendrimer, a polymer, liposomes, or a cationic delivery system. Positively charged cationic delivery systems facilitate binding of an iRNA molecule (negatively charged) and also enhance interactions at the negatively charged cell membrane to permit efficient uptake of an iRNA by the cell. Cationic lipids, dendrimers, or polymers can either be bound to an iRNA, or induced to form a vesicle or micelle (see e.g., Kim S H., et al (2008) Journal of Controlled Release 129(2):107-116) that encases an iRNA. The formation of vesicles or micelles further prevents degradation of the iRNA when administered systemically. Methods for making and administering cationic-iRNA complexes are well within the abilities of one skilled in the art (see e.g., Sorensen, D R., et al (2003) J. Mol. Biol 327:761-766; Verma, U N., et al (2003) Clin. Cancer Res. 9:1291-1300; Arnold, A S et al (2007) J. Hypertens. 25:197-205, which are incorporated herein by reference in their entirety). Some non-limiting examples of drug delivery systems useful for systemic delivery of iRNAs include DOTAP (Sorensen, D R., et al (2003), supra; Verma, U N., et al (2003), supra), Oligofectamine, “solid nucleic acid lipid particles” (Zimmermann, T S., et al (2006) Nature 441:111-114), cardiolipin (Chien, P Y., et al (2005) Cancer Gene Ther. 12:321-328; Pal, A., et al (2005) Int J. Oncol. 26:1087-1091), polyethyleneimine (Bonnet M E., et al (2008) Pharm. Res. August 16 Epub ahead of print; Aigner, A. (2006) J. Biomed. Biotechnol. 71659), Arg-Gly-Asp (RGD) peptides (Liu, S. (2006) Mol. Pharm. 3:472-487), and polyamidoamines (Tomalia, D A., et al (2007) Biochem. Soc. Trans. 35:61-67; Yoo, H., et al (1999) Pharm. Res. 16:1799-1804). In some embodiments, an iRNA forms a complex with cyclodextrin for systemic administration. Methods for administration and pharmaceutical compositions of iRNAs and cyclodextrins can be found in U.S. Pat. No. 7,427,605, which is herein incorporated by reference in its entirety.

[0414] Vector Encoded iRNAs

[0415] In another aspect, iRNA targeting the MARC1 gene can be expressed from transcription units inserted into DNA or RNA vectors (see, e.g., Couture, A, et al., TIG. (1996), 12:5-10; Skillern, A., et al., International PCT Publication No. WO 00/22113, Conrad, International PCT Publication No. WO 00/22114, and Conrad, U.S. Pat. No. 6,054,299). Expression can be transient (on the order of hours to weeks) or sustained (weeks to months or longer), depending upon the specific construct used and the target tissue or cell type. These transgenes can be introduced as a linear construct, a circular plasmid, or a viral vector, which can be an integrating or non-integrating vector. The transgene can also be constructed to permit it to be inherited as an extrachromosomal plasmid (Gassmann, et al., Proc. Natl. Acad. Sci. USA (1995) 92:1292).

[0416] The individual strand or strands of an iRNA can be transcribed from a promoter on an expression vector. Where two separate strands are to be expressed to generate, for example, a dsRNA, two separate expression vectors can be co-introduced (e.g., by transfection or infection) into a target cell. Alternatively each individual strand of a dsRNA can be transcribed by promoters both of which are located on the same expression plasmid. In some embodiments, a dsRNA is expressed as an inverted repeat joined by a linker polynucleotide sequence such that the dsRNA has a stem and loop structure.

[0417] An iRNA expression vector is typically a DNA plasmid or viral vector. An expression vector compatible with eukaryotic cells, e.g., with vertebrate cells, can be used to produce recombinant constructs for the expression of an iRNA as described herein. Eukaryotic cell expression vectors are well known in the art and are available from a number of commercial sources. Typically, such vectors contain convenient restriction sites for insertion of the desired nucleic acid segment. Delivery of iRNA expressing vectors can be systemic, such as by intravenous or intramuscular administration, by administration to target cells ex-planted from the patient followed by reintroduction into the patient, or by any other means that allows for introduction into a desired target cell.

[0418] An iRNA expression plasmid can be transfected into a target cell as a complex with a cationic lipid carrier (e.g., Oligofectamine) or a non-cationic lipid-based carrier (e.g., Transit-TKO™). Multiple lipid transfections for iRNA-mediated knockdowns targeting different regions of a target RNA over a period of a week or more are also contemplated by the disclosure. Successful introduction of vectors into host cells can be monitored using various known methods. For example, transient transfection can be signaled with a reporter, such as a fluorescent marker, such as Green Fluorescent Protein (GFP). Stable transfection of cells ex vivo can be ensured using markers that provide the transfected cell with resistance to specific environmental factors (e.g., antibiotics and drugs), such as hygromycin B resistance.

[0419] Viral vector systems which can be utilized with the methods and compositions described herein include, but are not limited to, (a) adenovirus vectors; (b) retrovirus vectors, including but not limited to lentiviral vectors, moloney murine leukemia virus, etc.; (c) adeno-associated virus vectors; (d) herpes simplex virus vectors; (e) SV40 vectors; (f) polyoma virus vectors; (g) papilloma virus vectors; (h) picornavirus vectors; (i) pox virus vectors such as an orthopox, e.g., vaccinia virus vectors or avipox, e.g. canary pox or fowl pox; and (j) a helper-dependent or gutless adenovirus. Replication-defective viruses can also be advantageous. Different vectors will or will not become incorporated into the cells' genome. The constructs can include viral sequences for transfection, if desired. Alternatively, the construct may be incorporated into vectors capable of episomal replication, e.g EPV and EBV vectors. Constructs for the recombinant expression of an iRNA will generally require regulatory elements, e.g., promoters, enhancers, etc., to ensure the expression of the iRNA in target cells. Other aspects to consider for vectors and constructs are further described below.

[0420] Vectors useful for the delivery of an iRNA will include regulatory elements (promoter, enhancer, etc.) sufficient for expression of the iRNA in the desired target cell or tissue. The regulatory elements can be chosen to provide either constitutive or regulated/inducible expression.

[0421] Expression of the iRNA can be precisely regulated, for example, by using an inducible regulatory sequence that is sensitive to certain physiological regulators, e.g., circulating glucose levels, or hormones (Docherty et al., 1994, FASEB J. 8:20-24). Such inducible expression systems, suitable for the control of dsRNA expression in cells or in mammals include, for example, regulation by ecdysone, by estrogen, progesterone, tetracycline, chemical inducers of dimerization, and isopropyl-β-D1-thiogalactopyranoside (IPTG). A person skilled in the art would be able to choose the appropriate regulatory/promoter sequence based on the intended use of the iRNA transgene.

[0422] In a specific embodiment, viral vectors that contain nucleic acid sequences encoding an iRNA can be used. For example, a retroviral vector can be used (see Miller et al., Meth. Enzymol. 217:581-599 (1993)). These retroviral vectors contain the components necessary for the correct packaging of the viral genome and integration into the host cell DNA. The nucleic acid sequences encoding an iRNA are cloned into one or more vectors, which facilitates delivery of the nucleic acid into a patient. More detail about retroviral vectors can be found, for example, in Boesen et al., Biotherapy 6:291-302 (1994), which describes the use of a retroviral vector to deliver the mdr1 gene to hematopoietic stem cells in order to make the stem cells more resistant to chemotherapy. Other references illustrating the use of retroviral vectors in gene therapy are: Clowes et al., J. Clin. Invest. 93:644-651 (1994); Kiem et al., Blood 83:1467-1473 (1994); Salmons and Gunzberg, Human Gene Therapy 4:129-141 (1993); and Grossman and Wilson, Curr. Opin. in Genetics and Devel. 3:110-114 (1993). Lentiviral vectors contemplated for use include, for example, the HIV based vectors described in U.S. Pat. Nos. 6,143,520; 5,665,557; and 5,981,276, which are herein incorporated by reference.

[0423] Adenoviruses are also contemplated for use in delivery of iRNAs. Adenoviruses are especially attractive vehicles, e.g., for delivering genes to respiratory epithelia. Adenoviruses naturally infect respiratory epithelia where they cause a mild disease. Other targets for adenovirus-based delivery systems are liver, the central nervous system, endothelial cells, and muscle. Adenoviruses have the advantage of being capable of infecting non-dividing cells. Kozarsky and Wilson, Current Opinion in Genetics and Development 3:499-503 (1993) present a review of adenovirus-based gene therapy. Bout et al., Human Gene Therapy 5:3-10 (1994) demonstrated the use of adenovirus vectors to transfer genes to the respiratory epithelia of rhesus monkeys. Other instances of the use of adenoviruses in gene therapy can be found in Rosenfeld et al., Science 252:431-434 (1991); Rosenfeld et al., Cell 68:143-155 (1992); Mastrangeli et al., J. Clin. Invest. 91:225-234 (1993); PCT Publication WO94/12649; and Wang, et al., Gene Therapy 2:775-783 (1995). A suitable AV vector for expressing an iRNA featured in the disclosure, a method for constructing the recombinant AV vector, and a method for delivering the vector into target cells, are described in Xia H et al. (2002), Nat. Biotech. 20: 1006-1010.

[0424] Use of Adeno-associated virus (AAV) vectors is also contemplated (Walsh et al., Proc. Soc. Exp. Biol. Med. 204:289-300 (1993); U.S. Pat. No. 5,436,146). In some embodiments, the iRNA can be expressed as two separate, complementary single-stranded RNA molecules from a recombinant AAV vector having, for example, either the U6 or H1 RNA promoters, or the cytomegalovirus (CMV) promoter. Suitable AAV vectors for expressing the dsRNA featured in the disclosure, methods for constructing the recombinant AV vector, and methods for delivering the vectors into target cells are described in Samulski R et al. (1987), J. Virol. 61: 3096-3101; Fisher K J et al. (1996), J. Virol., 70: 520-532; Samulski R et al. (1989), J. Virol. 63: 3822-3826; U.S. Pat. Nos. 5,252,479; 5,139,941; International Patent Application No. WO 94/13788; and International Patent Application No. WO 93/24641, the entire disclosures of which are herein incorporated by reference.

[0425] Another typical viral vector is a pox virus such as a vaccinia virus, for example an attenuated vaccinia such as Modified Virus Ankara (MVA) or NYVAC, an avipox such as fowl pox or canary pox.

[0426] The tropism of viral vectors can be modified by pseudotyping the vectors with envelope proteins or other surface antigens from other viruses, or by substituting different viral capsid proteins, as appropriate. For example, lentiviral vectors can be pseudotyped with surface proteins from vesicular stomatitis virus (VSV), rabies, Ebola, Mokola, and the like. AAV vectors can be made to target different cells by engineering the vectors to express different capsid protein serotypes; see, e.g., Rabinowitz J E et al. (2002), J Virol 76:791-801, the entire disclosure of which is herein incorporated by reference.

[0427] The pharmaceutical preparation of a vector can include the vector in an acceptable diluent, or can include a slow release matrix in which the gene delivery vehicle is imbedded. Alternatively, where the complete gene delivery vector can be produced intact from recombinant cells, e.g., retroviral vectors, the pharmaceutical preparation can include one or more cells which produce the gene delivery system.

### III. Pharmaceutical Compositions Containing iRNA

[0428] In some embodiments, the disclosure provides pharmaceutical compositions containing an iRNA, as described herein, and a pharmaceutically acceptable carrier. The pharmaceutical composition containing the iRNA is useful for treating a disease or disorder related to the expression or activity of a MARC1 gene (e.g., a metabolic disorder or hepatic fibrosis). Such pharmaceutical compositions are formulated based on the mode of delivery. For example, compositions can be formulated for systemic administration via parenteral delivery, e.g., by intravenous (IV) delivery. In some embodiments, a composition provided herein (e.g., a composition comprising a GalNAc conjugate or an LNP formulation) is formulated for intravenous delivery. In some embodiments, a composition provided herein is formulated for subcutaneous delivery.

[0429] The pharmaceutical compositions featured herein are administered in a dosage sufficient to inhibit expression of a MARC1 gene. In general, a suitable dose of iRNA will be in the range of 0.01 to 200.0 milligrams per kilogram body weight of the recipient per day, generally in the range of 1 to 50 mg per kilogram body weight per day. For example, the dsRNA can be administered at 0.05 mg/kg, 0.5 mg/kg, 1 mg/kg, 1.5 mg/kg, 2 mg/kg, 3 mg/kg, 10 mg/kg, 20 mg/kg, 30 mg/kg, 40 mg/kg, or 50 mg/kg per single dose. The pharmaceutical composition may be administered once daily, or the iRNA may be administered as two, three, or more sub-doses at appropriate intervals throughout the day or even using continuous infusion or delivery through a controlled release formulation. In that case, the iRNA contained in each sub-dose must be correspondingly smaller in order to achieve the total daily dosage. The dosage unit can also be compounded for delivery over several days, e.g., using a conventional sustained release formulation which provides sustained release of the iRNA over a several day period. Sustained release formulations are well known in the art and are particularly useful for delivery of agents at a particular site, such as can be used with the agents of the present disclosure. In this embodiment, the dosage unit contains a corresponding multiple of the daily dose.

[0430] The effect of a single dose on MARC1 levels can be long lasting, such that subsequent doses are administered at not more than 3, 4, or 5-day intervals, or at not more than 1, 2, 3, 4, 12, 24, or 36 week intervals.

[0431] The skilled artisan will appreciate that certain factors may influence the dosage and timing required to effectively treat a subject, including but not limited to the severity of the disease or disorder, previous treatments, the general health and/or age of the subject, and other diseases present. Moreover, treatment of a subject with a therapeutically effective amount of a composition can include a single treatment or a series of treatments. Estimates of effective dosages and in vivo half-lives for the individual iRNAs encompassed by the disclosure can be made using conventional methodologies or on the basis of in vivo testing using a suitable animal model.

[0432] A suitable animal model, e.g., a mouse containing a transgene expressing human MARC1, can be used to determine the therapeutically effective dose and/or an effective dosage regimen administration of a MARC1 siRNA.

[0433] The present disclosure also includes pharmaceutical compositions and formulations that include the iRNA compounds featured herein. The pharmaceutical compositions of the present disclosure may be administered in a number of ways depending upon whether local or systemic treatment is desired and upon the area to be treated. Administration may be topical (e.g., by a transdermal patch), pulmonary, e.g., by inhalation or insufflation of powders or aerosols, including by nebulizer; intratracheal, intranasal, epidermal and transdermal, oral or parenteral. Parenteral administration includes intravenous, intraarterial, subcutaneous, intraperitoneal or intramuscular injection or infusion; subdermal, e.g., via an implanted device; or intracranial, e.g., by intraparenchymal, intrathecal or intraventricular, administration.

[0434] The iRNA can be delivered in a manner to target a particular tissue, such as a tissue that produces erythrocytes. For example, the iRNA can be delivered to bone marrow, liver (e.g., hepatocytes of liver), lymph glands, spleen, lungs (e.g., pleura of lungs) or spine. In some embodiments, the iRNA is delivered to the liver.

[0435] Pharmaceutical compositions and formulations for topical administration may include transdermal patches, ointments, lotions, creams, gels, drops, suppositories, sprays, liquids and powders. Conventional pharmaceutical carriers, aqueous, powder or oily bases, thickeners and the like may be necessary or desirable. Coated condoms, gloves and the like may also be useful. Suitable topical formulations include those in which the iRNAs featured in the disclosure are in admixture with a topical delivery agent such as lipids, liposomes, fatty acids, fatty acid esters, steroids, chelating agents and surfactants. Suitable lipids and liposomes include neutral (e.g., dioleoylphosphatidyl DOPE ethanolamine, dimyristoylphosphatidyl choline DMPC, distearolyphosphatidyl choline) negative (e.g., dimyristoylphosphatidyl glycerol DMPG) and cationic (e.g., dioleoyltetramethylaminopropyl DOTAP and dioleoylphosphatidyl ethanolamine DOTMA). iRNAs featured in the disclosure may be encapsulated within liposomes or may form complexes thereto, in particular to cationic liposomes. Alternatively, iRNAs may be complexed to lipids, in particular to cationic lipids. Suitable fatty acids and esters include but are not limited to arachidonic acid, oleic acid, eicosanoic acid, lauric acid, caprylic acid, capric acid, myristic acid, palmitic acid, stearic acid, linoleic acid, linolenic acid, dicaprate, tricaprate, monoolein, dilaurin, glyceryl 1-monocaprate, 1-dodecylazacycloheptan-2-one, an acylcarnitine, an acylcholine, or a C₁₋₂₀ alkyl ester (e.g., isopropylmyristate IPM), monoglyceride, diglyceride or pharmaceutically acceptable salt thereof. Topical formulations are described in detail in U.S. Pat. No. 6,747,014, which is incorporated herein by reference.

[0436] Liposomal Formulations

[0437] There are many organized surfactant structures besides microemulsions that have been studied and used for the formulation of drugs. These include monolayers, micelles, bilayers and vesicles. Vesicles, such as liposomes, have attracted great interest because of their specificity and the duration of action they offer from the standpoint of drug delivery. As used in the present disclosure, the term “liposome” means a vesicle composed of amphiphilic lipids arranged in a spherical bilayer or bilayers.

[0438] Liposomes are unilamellar or multilamellar vesicles which have a membrane formed from a lipophilic material and an aqueous interior. The aqueous portion contains the composition to be delivered. Cationic liposomes possess the advantage of being able to fuse to the cell wall. Non-cationic liposomes, although not able to fuse as efficiently with the cell wall, are taken up by macrophages in vivo.

[0439] In order to traverse intact mammalian skin, lipid vesicles must pass through a series of fine pores, each with a diameter less than 50 nm, under the influence of a suitable transdermal gradient. Therefore, it is desirable to use a liposome which is highly deformable and able to pass through such fine pores.

[0440] Further advantages of liposomes include; liposomes obtained from natural phospholipids are biocompatible and biodegradable; liposomes can incorporate a wide range of water and lipid soluble drugs; liposomes can protect encapsulated drugs in their internal compartments from metabolism and degradation (Rosoff, in Pharmaceutical Dosage Forms, Lieberman, Rieger and Banker (Eds.), 1988, Marcel Dekker, Inc., New York, N.Y., volume 1, p. 245). Important considerations in the preparation of liposome formulations are the lipid surface charge, vesicle size and the aqueous volume of the liposomes.

[0441] Liposomes are useful for the transfer and delivery of active ingredients to the site of action. Because the liposomal membrane is structurally similar to biological membranes, when liposomes are applied to a tissue, the liposomes start to merge with the cellular membranes and as the merging of the liposome and cell progresses, the liposomal contents are emptied into the cell where the active agent may act.

[0442] Liposomal formulations have been the focus of extensive investigation as the mode of delivery for many drugs. There is growing evidence that for topical administration, liposomes present several advantages over other formulations. Such advantages include reduced side-effects related to high systemic absorption of the administered drug, increased accumulation of the administered drug at the desired target, and the ability to administer a wide variety of drugs, both hydrophilic and hydrophobic, into the skin.

[0443] Several reports have detailed the ability of liposomes to deliver agents including high-molecular weight DNA into the skin. Compounds including analgesics, antibodies, hormones and high-molecular weight DNAs have been administered to the skin. The majority of applications resulted in the targeting of the upper epidermis

[0444] Liposomes fall into two broad classes. Cationic liposomes are positively charged liposomes which interact with the negatively charged DNA molecules to form a stable complex. The positively charged DNA/liposome complex binds to the negatively charged cell surface and is internalized in an endosome. Due to the acidic pH within the endosome, the liposomes are ruptured, releasing their contents into the cell cytoplasm (Wang et al., Biochem. Biophys. Res. Commun., 1987, 147, 980-985).

[0445] Liposomes which are pH-sensitive or negatively-charged, entrap DNA rather than complex with it. Since both the DNA and the lipid are similarly charged, repulsion rather than complex formation occurs. Nevertheless, some DNA is entrapped within the aqueous interior of these liposomes. pH-sensitive liposomes have been used to deliver DNA encoding the thymidine kinase gene to cell monolayers in culture. Expression of the exogenous gene was detected in the target cells (Zhou et al., Journal of Controlled Release, 1992, 19, 269-274).

[0446] One major type of liposomal composition includes phospholipids other than naturally-derived phosphatidylcholine. Neutral liposome compositions, for example, can be formed from dimyristoyl phosphatidylcholine (DMPC) or dipalmitoyl phosphatidylcholine (DPPC). Anionic liposome compositions generally are formed from dimyristoyl phosphatidylglycerol, while anionic fusogenic liposomes are formed primarily from dioleoyl phosphatidylethanolamine (DOPE). Another type of liposomal composition is formed from phosphatidylcholine (PC) such as, for example, soybean PC, and egg PC. Another type is formed from mixtures of phospholipid and/or phosphatidylcholine and/or cholesterol.

[0447] Several studies have assessed the topical delivery of liposomal drug formulations to the skin. Application of liposomes containing interferon to guinea pig skin resulted in a reduction of skin herpes sores while delivery of interferon via other means (e.g., as a solution or as an emulsion) were ineffective (Weiner et al., Journal of Drug Targeting, 1992, 2, 405-410). Further, an additional study tested the efficacy of interferon administered as part of a liposomal formulation to the administration of interferon using an aqueous system, and concluded that the liposomal formulation was superior to aqueous administration (du Plessis et al., Antiviral Research, 1992, 18, 259-265).

[0448] Non-ionic liposomal systems have also been examined to determine their utility in the delivery of drugs to the skin, in particular systems comprising non-ionic surfactant and cholesterol. Non-ionic liposomal formulations comprising Novasome™ I (glyceryl dilaurate/cholesterol/polyoxyethylene-10-stearyl ether) and Novasome™ II (glyceryl distearate/cholesterol/polyoxyethylene-10-stearyl ether) were used to deliver cyclosporin-A into the dermis of mouse skin. Results indicated that such non-ionic liposomal systems were effective in facilitating the deposition of cyclosporin-A into different layers of the skin (Hu et al. S.T.P. Pharma. Sci., 1994, 4, 6, 466).

[0449] Liposomes also include “sterically stabilized” liposomes, a term which, as used herein, refers to liposomes comprising one or more specialized lipids that, when incorporated into liposomes, result in enhanced circulation lifetimes relative to liposomes lacking such specialized lipids. Examples of sterically stabilized liposomes are those in which part of the vesicle-forming lipid portion of the liposome (A) comprises one or more glycolipids, such as monosialoganglioside G_{M1}, or (B) is derivatized with one or more hydrophilic polymers, such as a polyethylene glycol (PEG) moiety. While not wishing to be bound by any particular theory, it is thought in the art that, at least for sterically stabilized liposomes containing gangliosides, sphingomyelin, or PEG-derivatized lipids, the enhanced circulation half-life of these sterically stabilized liposomes derives from a reduced uptake into cells of the reticuloendothelial system (RES) (Allen et al., FEBS Letters, 1987, 223, 42; Wu et al., Cancer Research, 1993, 53, 3765).

[0450] Various liposomes comprising one or more glycolipids are known in the art. Papahadjopoulos et al. (Ann. N.Y. Acad. Sci., 1987, 507, 64) reported the ability of monosialoganglioside G_{M1}, galactocerebroside sulfate and phosphatidylinositol to improve blood half-lives of liposomes. These findings were expounded upon by Gabizon et al. (Proc. Natl. Acad. Sci. U.S.A., 1988, 85, 6949). U.S. Pat. No. 4,837,028 and WO 88/04924, both to Allen et al., disclose liposomes comprising (1) sphingomyelin and (2) the ganglioside G_{M1} or a galactocerebroside sulfate ester. U.S. Pat. No. 5,543,152 (Webb et al.) discloses liposomes comprising sphingomyelin. Liposomes comprising 1,2-sn-dimyristoylphosphatidylcholine are disclosed in WO 97/13499 (Lim et al).

[0451] Many liposomes comprising lipids derivatized with one or more hydrophilic polymers, and methods of preparation thereof, are known in the art. Sunamoto et al. (Bull. Chem. Soc. Jpn., 1980, 53, 2778) described liposomes comprising a nonionic detergent, 2C_{1215G}, that contains a PEG moiety. Illum et al. (FEBS Lett., 1984, 167, 79) noted that hydrophilic coating of polystyrene particles with polymeric glycols results in significantly enhanced blood half-lives. Synthetic phospholipids modified by the attachment of carboxylic groups of polyalkylene glycols (e.g., PEG) are described by Sears (U.S. Pat. Nos. 4,426,330 and 4,534,899). Klibanov et al. (FEBS Lett., 1990, 268, 235) described experiments demonstrating that liposomes comprising phosphatidylethanolamine (PE) derivatized with PEG or PEG stearate have significant increases in blood circulation half-lives. Blume et al. (Biochimica et Biophysica Acta, 1990, 1029, 91) extended such observations to other PEG-derivatized phospholipids, e.g., DSPE-PEG, formed from the combination of distearoylphosphatidylethanolamine (DSPE) and PEG. Liposomes having covalently bound PEG moieties on their external surface are described in European Patent No. EP 0 445 131 B1 and WO 90/04384 to Fisher. Liposome compositions containing 1-20 mole percent of PE derivatized with PEG, and methods of use thereof, are described by Woodle et al. (U.S. Pat. Nos. 5,013,556 and 5,356,633) and Martin et al. (U.S. Pat. No. 5,213,804 and European Patent No. EP 0 496 813 B1). Liposomes comprising a number of other lipid-polymer conjugates are disclosed in WO 91/05545 and U.S. Pat. No. 5,225,212 (both to Martin et al.) and in WO 94/20073 (Zalipsky et al.). Liposomes comprising PEG-modified ceramide lipids are described in WO 96/10391 (Choi et al). U.S. Pat. No. 5,540,935 (Miyazaki et al.) and U.S. Pat. No. 5,556,948 (Tagawa et al.) describe PEG-containing liposomes that can be further derivatized with functional moieties on their surfaces.

[0452] A number of liposomes comprising nucleic acids are known in the art. WO 96/40062 to Thierry et al. discloses methods for encapsulating high molecular weight nucleic acids in liposomes. U.S. Pat. No. 5,264,221 to Tagawa et al. discloses protein-bonded liposomes and asserts that the contents of such liposomes may include a dsRNA. U.S. Pat. No. 5,665,710 to Rahman et al. describes certain methods of encapsulating oligodeoxynucleotides in liposomes. WO 97/04787 to Love et al. discloses liposomes comprising dsRNAs targeted to the raf gene.

[0453] Transfersomes are yet another type of liposomes, and are highly deformable lipid aggregates which are attractive candidates for drug delivery vehicles. Transfersomes may be described as lipid droplets which are so highly deformable that they are easily able to penetrate through pores which are smaller than the droplet. Transfersomes are adaptable to the environment in which they are used, e.g., they are self-optimizing (adaptive to the shape of pores in the skin), self-repairing, frequently reach their targets without fragmenting, and often self-loading. To make transfersomes it is possible to add surface edge-activators, usually surfactants, to a standard liposomal composition. Transfersomes have been used to deliver serum albumin to the skin. The transfersome-mediated delivery of serum albumin has been shown to be as effective as subcutaneous injection of a solution containing serum albumin.

[0454] Surfactants find wide application in formulations such as emulsions (including microemulsions) and liposomes. The most common way of classifying and ranking the properties of the many different types of surfactants, both natural and synthetic, is by the use of the hydrophile/lipophile balance (HLB). The nature of the hydrophilic group (also known as the “head”) provides the most useful means for categorizing the different surfactants used in formulations (Rieger, in Pharmaceutical Dosage Forms, Marcel Dekker, Inc., New York, N.Y., 1988, p. 285).

[0455] If the surfactant molecule is not ionized, it is classified as a nonionic surfactant. Nonionic surfactants find wide application in pharmaceutical and cosmetic products and are usable over a wide range of pH values. In general their HLB values range from 2 to about 18 depending on their structure. Nonionic surfactants include nonionic esters such as ethylene glycol esters, propylene glycol esters, glyceryl esters, polyglyceryl esters, sorbitan esters, sucrose esters, and ethoxylated esters. Nonionic alkanolamides and ethers such as fatty alcohol ethoxylates, propoxylated alcohols, and ethoxylated/propoxylated block polymers are also included in this class. The polyoxyethylene surfactants are the most popular members of the nonionic surfactant class.

[0456] If the surfactant molecule carries a negative charge when it is dissolved or dispersed in water, the surfactant is classified as anionic. Anionic surfactants include carboxylates such as soaps, acyl lactylates, acyl amides of amino acids, esters of sulfuric acid such as alkyl sulfates and ethoxylated alkyl sulfates, sulfonates such as alkyl benzene sulfonates, acyl isethionates, acyl taurates and sulfosuccinates, and phosphates. The most important members of the anionic surfactant class are the alkyl sulfates and the soaps.

[0457] If the surfactant molecule carries a positive charge when it is dissolved or dispersed in water, the surfactant is classified as cationic. Cationic surfactants include quaternary ammonium salts and ethoxylated amines. The quaternary ammonium salts are the most used members of this class.

[0458] If the surfactant molecule has the ability to carry either a positive or negative charge, the surfactant is classified as amphoteric. Amphoteric surfactants include acrylic acid derivatives, substituted alkylamides, N-alkylbetaines and phosphatides.

[0459] The use of surfactants in drug products, formulations and in emulsions has been reviewed (Rieger, in Pharmaceutical Dosage Forms, Marcel Dekker, Inc., New York, N.Y., 1988, p. 285).

[0460] Nucleic Acid Lipid Particles

[0461] In some embodiments, a MARC1 dsRNA featured in the disclosure is fully encapsulated in the lipid formulation, e.g., to form a SPLP, pSPLP, SNALP, or other nucleic acid-lipid particle. SNALPs and SPLPs typically contain a cationic lipid, a non-cationic lipid, and a lipid that prevents aggregation of the particle (e.g., a PEG-lipid conjugate). SNALPs and SPLPs are extremely useful for systemic applications, as they exhibit extended circulation lifetimes following intravenous (i.v.) injection and accumulate at distal sites (e.g., sites physically separated from the administration site). SPLPs include “pSPLP,” which include an encapsulated condensing agent-nucleic acid complex as set forth in PCT Publication No. WO 00/03683. The particles of the present disclosure typically have a mean diameter of about 50 nm to about 150 nm, more typically about 60 nm to about 130 nm, more typically about 70 nm to about 110 nm, most typically about 70 nm to about 90 nm, and are substantially nontoxic. In addition, the nucleic acids when present in the nucleic acid-lipid particles of the present disclosure are resistant in aqueous solution to degradation with a nuclease. Nucleic acid-lipid particles and their method of preparation are disclosed in, e.g., U.S. Pat. Nos. 5,976,567; 5,981,501; 6,534,484; 6,586,410; 6,815,432; and PCT Publication No. WO 96/40964.

[0462] In some embodiments, the lipid to drug ratio (mass/mass ratio) (e.g., lipid to dsRNA ratio) will be in the range of from about 1:1 to about 50:1, from about 1:1 to about 25:1, from about 3:1 to about 15:1, from about 4:1 to about 10:1, from about 5:1 to about 9:1, or about 6:1 to about 9:1.

[0463] The cationic lipid may be, for example, N,N-dioleyl-N,N-dimethylammonium chloride (DODAC), N,N-distearyl-N,N-dimethylammonium bromide (DDAB), N—(I-(2,3-dioleoyloxy)propyl)-N,N,N-trimethylammonium chloride (DOTAP), N—(I-(2,3-dioleyloxy)propyl)-N,N,N-trimethylammonium chloride (DOTMA), N,N-dimethyl-2,3-dioleyloxy)propylamine (DODMA), 1,2-DiLinoleyloxy-N,N-dimethylaminopropane (DLinDMA), 1,2-Dilinolenyloxy-N,N-dimethylaminopropane (DLenDMA), 1,2-Dilinoleylcarbamoyloxy-3-dimethylaminopropane (DLin-C-DAP), 1,2-Dilinoleyoxy-3-(dimethylamino)acetoxypropane (DLin-DAC), 1,2-Dilinoleyoxy-3-morpholinopropane (DLin-MA), 1,2-Dilinoleoyl-3-dimethylaminopropane (DLinDAP), 1,2-Dilinoleylthio-3-dimethylaminopropane (DLin-S-DMA), 1-Linoleoyl-2-linoleyloxy-3-dimethylaminopropane (DLin-2-DMAP), 1,2-Dilinoleyloxy-3-trimethylaminopropane chloride salt (DLin-TMA.Cl), 1,2-Dilinoleoyl-3-trimethylaminopropane chloride salt (DLin-TAP.Cl), 1,2-Dilinoleyloxy-3-(N-methylpiperazino)propane (DLin-MPZ), or 3-(N,N-Dilinoleylamino)-1,2-propanediol (DLinAP), 3-(N,N-Dioleylamino)-1,2-propanedio (DOAP), 1,2-Dilinoleyloxo-3-(2-N,N-dimethylamino)ethoxypropane (DLin-EG-DMA), 1,2-Dilinolenyloxy-N,N-dimethylaminopropane (DLinDMA), 2,2-Dilinoleyl-4-dimethylaminomethyl-[1,3]-dioxolane (DLin-K-DMA) or analogs thereof, (3aR,5s,6aS)-N,N-dimethyl-2,2-di((9Z,12Z)-octadeca-9,12-dienyl)tetrahydro-3aH-cyclopenta[d][1,3]dioxol-5-amine (ALN100), (6Z,9Z,28Z,31Z)-heptatriaconta-6,9,28,31-tetraen-19-yl 4-(dimethylamino)butanoate (MC3), 1,1′-(2-(4-(2-((2-(bis(2-hydroxydodecyl)amino)ethyl)(2-hydroxydodecyl)amino)ethyl)piperazin-1-yl)ethylazanediyl)didodecan-2-ol (Tech G1), or a mixture thereof. The cationic lipid may comprise from about 20 mol % to about 50 mol % or about 40 mol % of the total lipid present in the particle.

[0464] In some embodiments, the compound 2,2-Dilinoleyl-4-dimethylaminoethyl-[1,3]-dioxolane can be used to prepare lipid-siRNA nanoparticles. Synthesis of 2,2-Dilinoleyl dimethylaminoethyl-[1,3]-dioxolane is described in U.S. provisional patent application No. 61/107,998 filed on Oct. 23, 2008, which is herein incorporated by reference.

[0465] In some embodiments, the lipid-siRNA particle includes 40% 2, 2-Dilinoleyl-4-dimethylaminoethyl-[1,3]-dioxolane: 10% DSPC: 40% Cholesterol: 10% PEG-C-DOMG (mole percent) with a particle size of 63.0±20 nm and a 0.027 siRNA/Lipid Ratio.

[0466] The non-cationic lipid may be an anionic lipid or a neutral lipid including, but not limited to, distearoylphosphatidylcholine (DSPC), dioleoylphosphatidylcholine (DOPC), dipalmitoylphosphatidylcholine (DPPC), dioleoylphosphatidylglycerol (DOPG), dipalmitoylphosphatidylglycerol (DPPG), dioleoyl-phosphatidylethanolamine (DOPE), palmitoyloleoylphosphatidylcholine (POPC), palmitoyloleoylphosphatidylethanolamine (POPE), dioleoyl-phosphatidylethanolamine 4-(N-maleimidomethyl)-cyclohexane-1-carboxylate (DOPE-mal), dipalmitoyl phosphatidyl ethanolamine (DPPE), dimyristoylphosphoethanolamine (DMPE), distearoyl-phosphatidyl-ethanolamine (DSPE), 16-O-monomethyl PE, 16-O-dimethyl PE, 18-1-trans PE, 1-stearoyl-2-oleoyl-phosphatidyethanolamine (SOPE), cholesterol, or a mixture thereof. The non-cationic lipid may be from about 5 mol % to about 90 mol %, about 10 mol %, or about 58 mol % if cholesterol is included, of the total lipid present in the particle.

[0467] The conjugated lipid that inhibits aggregation of particles may be, for example, a polyethyleneglycol (PEG)-lipid including, without limitation, a PEG-diacylglycerol (DAG), a PEG-dialkyloxypropyl (DAA), a PEG-phospholipid, a PEG-ceramide (Cer), or a mixture thereof. The PEG-DAA conjugate may be, for example, a PEG-dilauryloxypropyl (Ci₂), a PEG-dimyristyloxypropyl (Ci₄), a PEG-dipalmityloxypropyl (Ci₆), or a PEG-distearyloxypropyl (C]₈). The conjugated lipid that prevents aggregation of particles may be from 0 mol % to about 20 mol % or about 2 mol % of the total lipid present in the particle.

[0468] In some embodiments, the nucleic acid-lipid particle further includes cholesterol at, e.g., about 10 mol % to about 60 mol % or about 48 mol % of the total lipid present in the particle.

[0469] In some embodiments, the iRNA is formulated in a lipid nanoparticle (LNP).

[0470] LNP01

[0471] In some embodiments, the lipidoid ND98·4HCl (MW 1487) (see U.S. patent application Ser. No. 12/056,230, filed Mar. 26, 2008, which is herein incorporated by reference), Cholesterol (Sigma-Aldrich), and PEG-Ceramide C16 (Avanti Polar Lipids) can be used to prepare lipid-dsRNA nanoparticles (e.g., LNP01 particles). Stock solutions of each in ethanol can be prepared as follows: ND98, 133 mg/ml; Cholesterol, 25 mg/ml, PEG-Ceramide C16, 100 mg/ml. The ND98, Cholesterol, and PEG-Ceramide C16 stock solutions can then be combined in a, e.g., 42:48:10 molar ratio. The combined lipid solution can be mixed with aqueous dsRNA (e.g., in sodium acetate pH 5) such that the final ethanol concentration is about 35-45% and the final sodium acetate concentration is about 100-300 mM. Lipid-dsRNA nanoparticles typically form spontaneously upon mixing. Depending on the desired particle size distribution, the resultant nanoparticle mixture can be extruded through a polycarbonate membrane (e.g., 100 nm cut-off) using, for example, a thermobarrel extruder, such as Lipex Extruder (Northern Lipids, Inc). In some cases, the extrusion step can be omitted. Ethanol removal and simultaneous buffer exchange can be accomplished by, for example, dialysis or tangential flow filtration. Buffer can be exchanged with, for example, phosphate buffered saline (PBS) at about pH 7, e.g., about pH 6.9, about pH 7.0, about pH 7.1, about pH 7.2, about pH 7.3, or about pH 7.4.

[chemical structure]

[0472] LNP01 formulations are described, e.g., in International Application Publication No. WO 2008/042973, which is hereby incorporated by reference.

[0473] Additional exemplary lipid-dsRNA formulations are provided in the following table.

TABLE 7
Exemplary lipid formulations

| | | cationic lipid/non-cationic lipid/ |
|---|---|---|
| | | cholesterol/PEG-lipid conjugate |
| | Cationic Lipid | Lipid:siRNA ratio |
| SNALP | 1,2-Dilinolenyloxy-N,N- | DLinDMA/DPPC/Cholesterol/PEG-cDMA |
| | dimethylaminopropane (DLinDMA) | (57.1/7.1/34.4/1.4) |
| | | lipid:siRNA ~7:1 |
| S-XTC | 2,2-Dilinoleyl-4-dimethylaminoethyl-[1,3]- | XTC/DPPC/Cholesterol/PEG-cDMA |
| | dioxolane (XTC) | 57.1/7.1/34.4/1.4 |
| | | lipid:siRNA ~7:1 |
| LNP05 | 2,2-Dilinoleyl-4-dimethylaminoethyl-[1,3]- | XTC/DSPC/Cholesterol/PEG-DMG |
| | dioxolane (XTC) | 57.5/7.5/31.5/3.5 |
| | | lipid:siRNA ~6:1 |
| LNP06 | 2,2-Dilinoleyl-4-dimethylaminoethyl-[1,3]- | XTC/DSPC/Cholesterol/PEG-DMG |
| | dioxolane (XTC) | 57.5/7.5/31.5/3.5 |
| | | lipid:siRNA ~11:1 |
| LNP07 | 2,2-Dilinoleyl-4-dimethylaminoethyl-[1,3]- | XTC/DSPC/Cholesterol/PEG-DMG |
| | dioxolane (XTC) | 60/7.5/31/1.5, |
| | | lipid:siRNA ~6:1 |
| LNP08 | 2,2-Dilinoleyl-4-dimethylaminoethyl-[1,3]- | XTC/DSPC/Cholesterol/PEG-DMG |
| | dioxolane (XTC) | 60/7.5/31/1.5, |
| | | lipid:siRNA ~11:1 |
| LNP09 | 2,2-Dilinoleyl-4-dimethylaminoethyl-[1,3]- | XTC/DSPC/Cholesterol/PEG-DMG |
| | dioxolane (XTC) | 50/10/38.5/1.5 |
| | | Lipid:siRNA 10:1 |
| LNP10 | (3aR,5s,6aS)-N,N-dimethyl-2,2-di((9Z,12Z)- | ALN100/DSPC/Cholesterol/PEG-DMG |
| | octadeca-9,12-dienyl)tetrahydro-3aH- | 50/10/38.5/1.5 |
| | cyclopenta[d][1,3]dioxol-5-amine (ALN100) | Lipid:siRNA 10:1 |
| LNP11 | (6Z,9Z,28Z,31Z)-heptatriaconta-6,9,28,31- | MC-3/DSPC/Cholesterol/PEG-DMG |
| | tetraen-19-yl 4-(dimethylamino)butanoate | 50/10/38.5/1.5 |
| | (MC3) | Lipid:siRNA 10:1 |
| LNP12 | 1,1′-(2-(4-(2-((2-(bis(2- | C12-200/DSPC/Cholesterol/PEG-DMG |
| | hydroxydodecyl)amino)ethyl)(2- | 50/10/38.5/1.5 |
| | hydroxydodecyl)amino)ethyl)piperazin-1- | Lipid:siRNA 10:1 |
| | yl)ethylazanediyl)didodecan-2-ol (C12-200) | |
| LNP13 | XTC | XTC/DSPC/Chol/PEG-DMG |
| | | 50/10/38.5/1.5 |
| | | Lipid:siRNA: 33:1 |
| LNP14 | MC3 | MC3/DSPC/Chol/PEG-DMG |
| | | 40/15/40/5 |
| | | Lipid:siRNA: 11:1 |
| LNP15 | MC3 | MC3/DSPC/Chol/PEG- |
| | | DSG/GalNAc-PEG-DSG |
| | | 50/10/35/4.5/0.5 |
| | | Lipid:siRNA: 11:1 |
| LNP16 | MC3 | MC3/DSPC/Chol/PEG-DMG |
| | | 50/10/38.5/1.5 |
| | | Lipid:siRNA: 7:1 |
| LNP17 | MC3 | MC3/DSPC/Chol/PEG-DSG |
| | | 50/10/38.5/1.5 |
| | | Lipid:siRNA: 10:1 |
| LNP18 | MC3 | MC3/DSPC/Chol/PEG-DMG |
| | | 50/10/38.5/1.5 |
| | | Lipid:siRNA: 12:1 |
| LNP19 | MC3 | MC3/DSPC/Chol/PEG-DMG |
| | | 50/10/35/5 |
| | | Lipid:siRNA: 8:1 |
| LNP20 | MC3 | MC3/DSPC/Chol/PEG-DPG |
| | | 50/10/38.5/1.5 |
| | | Lipid:siRNA: 10:1 |
| LNP21 | C12-200 | C12-200/DSPC/Chol/PEG-DSG |
| | | 50/10/38.5/1.5 |
| | | Lipid:siRNA: 7:1 |
| LNP22 | XTC | XTC/DSPC/Chol/PEG-DSG |
| | | 50/10/38.5/1.5 |
| | | Lipid:siRNA: 10:1 |

DSPC: distearoylphosphatidylcholine
DPPC: dipalmitoylphosphatidylcholine
PEG-DMG: PEG-didimyristoyl glycerol (C14-PEG, or PEG-C14) (PEG with avg mol wt of 2000)
PEG-DSG: PEG-distyryl glycerol (C18-PEG, or PEG-C18) (PEG with avg mol wt of 2000)
PEG-cDMA: PEG-carbamoyl-1,2-dimyristyloxypropylamine (PEG with avg mol wt of 2000)

[0474] SNALP (1,2-Dilinolenyloxy-N,N-dimethylaminopropane (DLinDMA)) comprising formulations are described in International Publication No. WO2009/127060, filed Apr. 15, 2009, which is hereby incorporated by reference.

[0475] XTC comprising formulations are described, e.g., in U.S. Provisional Ser. No. 61/148,366, filed Jan. 29, 2009; U.S. Provisional Ser. No. 61/156,851, filed Mar. 2, 2009; U.S. Provisional Ser. No. 61/185,712, filed Jun. 10, 2009; U.S. Provisional Ser. No. 61/228,373, filed Jul. 24, 2009; U.S. Provisional Ser. No. 61/239,686, filed Sep. 3, 2009, and International Application No. PCT/US2010/022614, filed Jan. 29, 2010, which are hereby incorporated by reference.

[0476] MC3 comprising formulations are described, e.g., in U.S. Provisional Ser. No. 61/244,834, filed Sep. 22, 2009, U.S. Provisional Ser. No. 61/185,800, filed Jun. 10, 2009, and International Application No. PCT/US10/28224, filed Jun. 10, 2010, which are hereby incorporated by reference.

[0477] ALNY-100 comprising formulations are described, e.g., International patent application number PCT/US09/63933, filed on Nov. 10, 2009, which is hereby incorporated by reference.

[0478] C12-200 comprising formulations are described in U.S. Provisional Ser. No. 61/175,770, filed May 5, 2009 and International Application No. PCT/US10/33777, filed May 5, 2010, which are hereby incorporated by reference.

[0479] Synthesis of Cationic Lipids

[0480] Any of the compounds, e.g., cationic lipids and the like, used in the nucleic acid-lipid particles featured in the disclosure may be prepared by known organic synthesis techniques. All substituents are as defined below unless indicated otherwise.

[0481] “Alkyl” means a straight chain or branched, noncyclic or cyclic, saturated aliphatic hydrocarbon containing from 1 to 24 carbon atoms. Representative saturated straight chain alkyls include methyl, ethyl, n-propyl, n-butyl, n-pentyl, n-hexyl, and the like; while saturated branched alkyls include isopropyl, sec-butyl, isobutyl, tert-butyl, isopentyl, and the like. Representative saturated cyclic alkyls include cyclopropyl, cyclobutyl, cyclopentyl, cyclohexyl, and the like; while unsaturated cyclic alkyls include cyclopentenyl and cyclohexenyl, and the like.

[0482] “Alkenyl” means an alkyl, as defined above, containing at least one double bond between adjacent carbon atoms. Alkenyls include both cis and trans isomers. Representative straight chain and branched alkenyls include ethylenyl, propylenyl, 1-butenyl, 2-butenyl, isobutylenyl, 1-pentenyl, 2-pentenyl, 3-methyl-1-butenyl, 2-methyl-2-butenyl, 2,3-dimethyl-2-butenyl, and the like.

[0483] “Alkynyl” means any alkyl or alkenyl, as defined above, which additionally contains at least one triple bond between adjacent carbons. Representative straight chain and branched alkynyls include acetylenyl, propynyl, 1-butynyl, 2-butynyl, 1-pentynyl, 2-pentynyl, 3-methyl-1 butynyl, and the like.

[0484] “Acyl” means any alkyl, alkenyl, or alkynyl wherein the carbon at the point of attachment is substituted with an oxo group, as defined below. For example, —C(═O)alkyl, —C(═O)alkenyl, and —C(═O)alkynyl are acyl groups.

[0485] “Heterocycle” means a 5- to 7-membered monocyclic, or 7- to 10-membered bicyclic, heterocyclic ring which is either saturated, unsaturated, or aromatic, and which contains from 1 or 2 heteroatoms independently selected from nitrogen, oxygen and sulfur, and wherein the nitrogen and sulfur heteroatoms may be optionally oxidized, and the nitrogen heteroatom may be optionally quaternized, including bicyclic rings in which any of the above heterocycles are fused to a benzene ring. The heterocycle may be attached via any heteroatom or carbon atom. Heterocycles include heteroaryls as defined below. Heterocycles include morpholinyl, pyrrolidinonyl, pyrrolidinyl, piperidinyl, piperizynyl, hydantoinyl, valerolactamyl, oxiranyl, oxetanyl, tetrahydrofuranyl, tetrahydropyranyl, tetrahydropyridinyl, tetrahydroprimidinyl, tetrahydrothiophenyl, tetrahydrothiopyranyl, tetrahydropyrimidinyl, tetrahydrothiophenyl, tetrahydrothiopyranyl, and the like.

[0486] The terms “optionally substituted alkyl”, “optionally substituted alkenyl”, “optionally substituted alkynyl”, “optionally substituted acyl”, and “optionally substituted heterocycle” means that, when substituted, at least one hydrogen atom is replaced with a substituent. In the case of an oxo substituent (═O) two hydrogen atoms are replaced. In this regard, substituents include oxo, halogen, heterocycle, —CN, —OR^{x}, —NR^{x}R^{y}, —NR^{x}C(═O)R^{y}, —NR^{x}SO₂R^{y}, —C(═O)R^{x}, —C(═O)OR^{x}, —C(═O)NR^{x}R^{y}, —SOₙR^{x} and —SOₙNR^{x}R^{y}, wherein n is 0, 1 or 2, R^{x} and R^{y} are the same or different and independently hydrogen, alkyl or heterocycle, and each of said alkyl and heterocycle substituents may be further substituted with one or more of oxo, halogen, —OH, —CN, alkyl, —OR^{x}, heterocycle, —NR^{x}R^{y}, —NR^{x}C(═O)R^{y}, —NR^{x}SO₂R^{y}, —C(═O)R^{x}, —C(═O)OR^{x}, —C(═O)NR^{x}R^{y}, —SOₙR^{x} and —SOₙNR^{x}R^{y}.

[0487] “Halogen” means fluoro, chloro, bromo and iodo.

[0488] In some embodiments, the methods featured in the disclosure may require the use of protecting groups. Protecting group methodology is well known to those skilled in the art (see, for example, PROTECTIVE GROUPS IN ORGANIC SYNTHESIS, Green, T. W. et al., Wiley-Interscience, New York City, 1999). Briefly, protecting groups within the context of this disclosure are any group that reduces or eliminates unwanted reactivity of a functional group. A protecting group can be added to a functional group to mask its reactivity during certain reactions and then removed to reveal the original functional group. In some embodiments an “alcohol protecting group” is used. An “alcohol protecting group” is any group which decreases or eliminates unwanted reactivity of an alcohol functional group. Protecting groups can be added and removed using techniques well known in the art.

[0489] Synthesis of Formula A

[0490] In some embodiments, nucleic acid-lipid particles featured in the disclosure are formulated using a cationic lipid of formula A:

[chemical structure]

where R1 and R2 are independently alkyl, alkenyl or alkynyl, each can be optionally substituted, and R3 and R4 are independently lower alkyl or R3 and R4 can be taken together to form an optionally substituted heterocyclic ring. In some embodiments, the cationic lipid is XTC (2,2-Dilinoleyl-4-dimethylaminoethyl-[1,3]-dioxolane). In general, the lipid of formula A above may be made by the following Reaction Schemes 1 or 2, wherein all substituents are as defined above unless indicated otherwise.

[chemical structure]

[0491] Lipid A, where R₁ and R₂ are independently alkyl, alkenyl or alkynyl, each can be optionally substituted, and R₃ and R₄ are independently lower alkyl or R₃ and R₄ can be taken together to form an optionally substituted heterocyclic ring, can be prepared according to Scheme 1. Ketone 1 and bromide 2 can be purchased or prepared according to methods known to those of ordinary skill in the art. Reaction of 1 and 2 yields ketal 3. Treatment of ketal 3 with amine 4 yields lipids of formula A. The lipids of formula A can be converted to the corresponding ammonium salt with an organic salt of formula 5, where X is anion counter ion selected from halogen, hydroxide, phosphate, sulfate, or the like.

[chemical structure]

[0492] Alternatively, the ketone 1 starting material can be prepared according to Scheme 2. Grignard reagent 6 and cyanide 7 can be purchased or prepared according to methods known to those of ordinary skill in the art. Reaction of 6 and 7 yields ketone 1. Conversion of ketone 1 to the corresponding lipids of formula A is as described in Scheme 1.

[0493] Synthesis of MC3

[0494] Preparation of DLin-M-C3-DMA (i.e., (6Z,9Z,28Z,31Z)-heptatriaconta-6,9,28,31-tetraen-19-yl 4-(dimethylamino)butanoate) was as follows. A solution of (6Z,9Z,28Z,31Z)-heptatriaconta-6,9,28,31-tetraen-19-ol (0.53 g), 4-N,N-dimethylaminobutyric acid hydrochloride (0.51 g), 4-N,N-dimethylaminopyridine (0.61 g) and 1-ethyl-3-(3-dimethylaminopropyl)carbodiimide hydrochloride (0.53 g) in dichloromethane (5 mL) was stirred at room temperature overnight. The solution was washed with dilute hydrochloric acid followed by dilute aqueous sodium bicarbonate. The organic fractions were dried over anhydrous magnesium sulphate, filtered and the solvent removed on a rotovap. The residue was passed down a silica gel column (20 g) using a 1-5% methanol/dichloromethane elution gradient. Fractions containing the purified product were combined and the solvent removed, yielding a colorless oil (0.54 g).

[0495] Synthesis of ALNY-100

[0496] Synthesis of ketal 519 [ALNY-100] was performed using the following scheme 3:

[chemical structure]

[0497] Synthesis of 515:

[0498] To a stirred suspension of LiAlH4 (3.74 g, 0.09852 mol) in 200 ml anhydrous THF in a two neck RBF (1 L), was added a solution of 514 (10 g, 0.04926 mol) in 70 mL of THF slowly at 0 OC under nitrogen atmosphere. After complete addition, reaction mixture was warmed to room temperature and then heated to reflux for 4 h. Progress of the reaction was monitored by TLC. After completion of reaction (by TLC) the mixture was cooled to 0° C. and quenched with careful addition of saturated Na2SO4 solution. Reaction mixture was stirred for 4 h at room temperature and filtered off. Residue was washed well with THF. The filtrate and washings were mixed and diluted with 400 mL dioxane and 26 mL conc. HCl and stirred for 20 minutes at room temperature. The volatilities were stripped off under vacuum to furnish the hydrochloride salt of 515 as a white solid. Yield: 7.12 g 1H-NMR (DMSO, 400 MHz): δ=9.34 (broad, 2H), 5.68 (s, 2H), 3.74 (m, 1H), 2.66-2.60 (m, 2H), 2.50-2.45 (m, 5H).

[0499] Synthesis of 516:

[0500] To a stirred solution of compound 515 in 100 mL dry DCM in a 250 mL two neck RBF, was added NEt3 (37.2 mL, 0.2669 mol) and cooled to 0° C. under nitrogen atmosphere. After a slow addition of N-(benzyloxy-carbonyloxy)-succinimide (20 g, 0.08007 mol) in 50 mL dry DCM, reaction mixture was allowed to warm to room temperature. After completion of the reaction (2-3 h by TLC) mixture was washed successively with 1N HCl solution (1×100 mL) and saturated NaHCO₃ solution (1×50 mL). The organic layer was then dried over anhyd. Na2SO4 and the solvent was evaporated to give crude material which was purified by silica gel column chromatography to get 516 as sticky mass. Yield: 11 g (89%). 1H-NMR (CDCl3, 400 MHz): δ=7.36-7.27 (m, 5H), 5.69 (s, 2H), 5.12 (s, 2H), 4.96 (br., 1H) 2.74 (s, 3H), 2.60 (m, 2H), 2.30-2.25 (m, 2H). LC-MS [M+H]−232.3 (96.94%).

[0501] Synthesis of 517A and 517B:

[0502] The cyclopentene 516 (5 g, 0.02164 mol) was dissolved in a solution of 220 mL acetone and water (10:1) in a single neck 500 mL RBF and to it was added N-methyl morpholine-N-oxide (7.6 g, 0.06492 mol) followed by 4.2 mL of 7.6% solution of OsO4 (0.275 g, 0.00108 mol) in tert-butanol at room temperature. After completion of the reaction (˜3 h), the mixture was quenched with addition of solid Na2SO3 and resulting mixture was stirred for 1.5 h at room temperature. Reaction mixture was diluted with DCM (300 mL) and washed with water (2×100 mL) followed by saturated NaHCO3 (1×50 mL) solution, water (1×30 mL) and finally with brine (1×50 mL). Organic phase was dried over an .Na2SO4 and solvent was removed in vacuum. Silica gel column chromatographic purification of the crude material was afforded a mixture of diastereomers, which were separated by prep HPLC. Yield: −6 g crude

[0503] 517A—Peak-1 (white solid), 5.13 g (96%). 1H-NMR (DMSO, 400 MHz): δ=7.39-7.31 (m, 5H), 5.04 (s, 2H), 4.78-4.73 (m, 1H), 4.48-4.47 (d, 2H), 3.94-3.93 (m, 2H), 2.71 (s, 3H), 1.72-1.67 (m, 4H). LC-MS−[M+H]−266.3, [M+NH4+]−283.5 present, HPLC-97.86%. Stereochemistry confirmed by X-ray.

[0504] Synthesis of 518:

[0505] Using a procedure analogous to that described for the synthesis of compound 505, compound 518 (1.2 g, 41%) was obtained as a colorless oil. 1H-NMR (CDCl3, 400 MHz): δ=7.35-7.33 (m, 4H), 7.30-7.27 (m, 1H), 5.37-5.27 (m, 8H), 5.12 (s, 2H), 4.75 (m, 1H), 4.58-4.57 (m, 2H), 2.78-2.74 (m, 7H), 2.06-2.00 (m, 8H), 1.96-1.91 (m, 2H), 1.62 (m, 4H), 1.48 (m, 2H), 1.37-1.25 (br m, 36H), 0.87 (m, 6H). HPLC-98.65%.

[0506] General Procedure for the Synthesis of Compound 519:

[0507] A solution of compound 518 (1 eq) in hexane (15 mL) was added in a drop-wise fashion to an ice-cold solution of LAH in THF (1 M, 2 eq). After complete addition, the mixture was heated at 40° C. over 0.5 h then cooled again on an ice bath. The mixture was carefully hydrolyzed with saturated aqueous Na2SO4 then filtered through celite and reduced to an oil. Column chromatography provided the pure 519 (1.3 g, 68%) which was obtained as a colorless oil. 13C NMR=130.2, 130.1 (×2), 127.9 (×3), 112.3, 79.3, 64.4, 44.7, 38.3, 35.4, 31.5, 29.9 (×2), 29.7, 29.6 (×2), 29.5 (×3), 29.3 (×2), 27.2 (×3), 25.6, 24.5, 23.3, 226, 14.1; Electrospray MS (+ve): Molecular weight for C44H80NO2 (M+H)+ Calc. 654.6, Found 654.6.

[0508] Formulations prepared by either the standard or extrusion-free method can be characterized in similar manners. For example, formulations are typically characterized by visual inspection. They should be whitish translucent solutions free from aggregates or sediment. Particle size and particle size distribution of lipid-nanoparticles can be measured by light scattering using, for example, a Malvern Zetasizer Nano ZS (Malvern, USA). Particles should be about 20-300 nm, such as 40-100 nm in size. The particle size distribution should be unimodal. The total dsRNA concentration in the formulation, as well as the entrapped fraction, is estimated using a dye exclusion assay. A sample of the formulated dsRNA can be incubated with an RNA-binding dye, such as Ribogreen (Molecular Probes) in the presence or absence of a formulation disrupting surfactant, e.g., 0.5% Triton-X100. The total dsRNA in the formulation can be determined by the signal from the sample containing the surfactant, relative to a standard curve. The entrapped fraction is determined by subtracting the “free” dsRNA content (as measured by the signal in the absence of surfactant) from the total dsRNA content. Percent entrapped dsRNA is typically >85%. For SNALP formulation, the particle size is at least 30 nm, at least 40 nm, at least 50 nm, at least 60 nm, at least 70 nm, at least 80 nm, at least 90 nm, at least 100 nm, at least 110 nm, and at least 120 nm. The suitable range is typically about at least 50 nm to about at least 110 nm, about at least 60 nm to about at least 100 nm, or about at least 80 nm to about at least 90 nm.

[0509] Compositions and formulations for oral administration include powders or granules, microparticulates, nanoparticulates, suspensions or solutions in water or non-aqueous media, capsules, gel capsules, sachets, tablets or minitablets. Thickeners, flavoring agents, diluents, emulsifiers, dispersing aids or binders may be desirable. In some embodiments, oral formulations are those in which dsRNAs featured in the disclosure are administered in conjunction with one or more penetration enhancers surfactants and chelators. Suitable surfactants include fatty acids and/or esters or salts thereof, bile acids and/or salts thereof. Suitable bile acids/salts include chenodeoxycholic acid (CDCA) and ursodeoxychenodeoxycholic acid (UDCA), cholic acid, dehydrocholic acid, deoxycholic acid, glucholic acid, glycholic acid, glycodeoxycholic acid, taurocholic acid, taurodeoxycholic acid, sodium tauro-24,25-dihydro-fusidate and sodium glycodihydrofusidate. Suitable fatty acids include arachidonic acid, undecanoic acid, oleic acid, lauric acid, caprylic acid, capric acid, myristic acid, palmitic acid, stearic acid, linoleic acid, linolenic acid, dicaprate, tricaprate, monoolein, dilaurin, glyceryl 1-monocaprate, 1-dodecylazacycloheptan-2-one, an acylcarnitine, an acylcholine, or a monoglyceride, a diglyceride or a pharmaceutically acceptable salt thereof (e.g., sodium). In some embodiments, combinations of penetration enhancers are used, for example, fatty acids/salts in combination with bile acids/salts. One exemplary combination is the sodium salt of lauric acid, capric acid and UDCA. Further penetration enhancers include polyoxyethylene-9-lauryl ether, polyoxyethylene-20-cetyl ether. DsRNAs featured in the disclosure may be delivered orally, in granular form including sprayed dried particles, or complexed to form micro or nanoparticles. DsRNA complexing agents include poly-amino acids; polyimines; polyacrylates; polyalkylacrylates, polyoxethanes, polyalkylcyanoacrylates; cationized gelatins, albumins, starches, acrylates, polyethyleneglycols (PEG) and starches; polyalkylcyanoacrylates; DEAE-derivatized polyimines, pollulans, celluloses and starches. Suitable complexing agents include chitosan, N-trimethylchitosan, poly-L-lysine, polyhistidine, polyornithine, polyspermines, protamine, polyvinylpyridine, polythiodiethylaminomethylethylene P(TDAE), polyaminostyrene (e.g., p-amino), poly(methylcyanoacrylate), poly(ethylcyanoacrylate), poly(butylcyanoacrylate), poly(isobutylcyanoacrylate), poly(isohexylcynaoacrylate), DEAE-methacrylate, DEAE-hexylacrylate, DEAE-acrylamide, DEAE-albumin and DEAE-dextran, polymethylacrylate, polyhexylacrylate, poly(D,L-lactic acid), poly(DL-lactic-co-glycolic acid (PLGA), alginate, and polyethyleneglycol (PEG). Oral formulations for dsRNAs and their preparation are described in detail in U.S. Pat. No. 6,887,906, US Publn. No. 20030027780, and U.S. Pat. No. 6,747,014, each of which is incorporated herein by reference.

[0510] Compositions and formulations for parenteral, intraparenchymal (into the brain), intrathecal, intraventricular or intrahepatic administration may include sterile aqueous solutions which may also contain buffers, diluents and other suitable additives such as, but not limited to, penetration enhancers, carrier compounds and other pharmaceutically acceptable carriers or excipients.

[0511] Pharmaceutical compositions of the present disclosure include, but are not limited to, solutions, emulsions, and liposome-containing formulations. These compositions may be generated from a variety of components that include, but are not limited to, preformed liquids, self-emulsifying solids and self-emulsifying semisolids.

[0512] The pharmaceutical formulations featured in the present disclosure, which may conveniently be presented in unit dosage form, may be prepared according to conventional techniques well known in the pharmaceutical industry. Such techniques include the step of bringing into association the active ingredients with the pharmaceutical carrier(s) or excipient(s). In general, the formulations are prepared by uniformly and intimately bringing into association the active ingredients with liquid carriers or finely divided solid carriers or both, and then, if necessary, shaping the product.

[0513] The compositions featured in the present disclosure may be formulated into any of many possible dosage forms such as, but not limited to, tablets, capsules, gel capsules, liquid syrups, soft gels, suppositories, and enemas. The compositions may also be formulated as suspensions in aqueous, non-aqueous or mixed media. Aqueous suspensions may further contain substances which increase the viscosity of the suspension including, for example, sodium carboxymethylcellulose, sorbitol and/or dextran. The suspension may also contain stabilizers.

[0514] Additional Formulations

[0515] Emulsions

[0516] The compositions of the present disclosure may be prepared and formulated as emulsions. Emulsions are typically heterogeneous systems of one liquid dispersed in another in the form of droplets usually exceeding 0.1 μm in diameter (see e.g., Ansel's Pharmaceutical Dosage Forms and Drug Delivery Systems, Allen, L V., Popovich N G., and Ansel H C., 2004, Lippincott Williams & Wilkins (8th ed.), New York, N.Y.; Idson, in Pharmaceutical Dosage Forms, Lieberman, Rieger and Banker (Eds.), 1988, Marcel Dekker, Inc., New York, N.Y., volume 1, p. 199; Rosoff, in Pharmaceutical Dosage Forms, Lieberman, Rieger and Banker (Eds.), 1988, Marcel Dekker, Inc., New York, N.Y., Volume 1, p. 245; Block in Pharmaceutical Dosage Forms, Lieberman, Rieger and Banker (Eds.), 1988, Marcel Dekker, Inc., New York, N.Y., volume 2, p. 335; Higuchi et al., in Remington's Pharmaceutical Sciences, Mack Publishing Co., Easton, Pa., 1985, p. 301). Emulsions are often biphasic systems comprising two immiscible liquid phases intimately mixed and dispersed with each other. In general, emulsions may be of either the water-in-oil (w/o) or the oil-in-water (o/w) variety. When an aqueous phase is finely divided into and dispersed as minute droplets into a bulk oily phase, the resulting composition is called a water-in-oil (w/o) emulsion. Alternatively, when an oily phase is finely divided into and dispersed as minute droplets into a bulk aqueous phase, the resulting composition is called an oil-in-water (o/w) emulsion. Emulsions may contain additional components in addition to the dispersed phases, and the active drug which may be present as a solution in either the aqueous phase, oily phase or itself as a separate phase. Pharmaceutical excipients such as emulsifiers, stabilizers, dyes, and anti-oxidants may also be present in emulsions as needed. Pharmaceutical emulsions may also be multiple emulsions that are comprised of more than two phases such as, for example, in the case of oil-in-water-in-oil (o/w/o) and water-in-oil-in-water (w/o/w) emulsions. Such complex formulations often provide certain advantages that simple binary emulsions do not. Multiple emulsions in which individual oil droplets of an o/w emulsion enclose small water droplets constitute a w/o/w emulsion. Likewise a system of oil droplets enclosed in globules of water stabilized in an oily continuous phase provides an o/w/o emulsion.

[0517] Emulsions are characterized by little or no thermodynamic stability. Often, the dispersed or discontinuous phase of the emulsion is well dispersed into the external or continuous phase and maintained in this form through the means of emulsifiers or the viscosity of the formulation. Either of the phases of the emulsion may be a semisolid or a solid, as is the case of emulsion-style ointment bases and creams. Other means of stabilizing emulsions entail the use of emulsifiers that may be incorporated into either phase of the emulsion. Emulsifiers may broadly be classified into four categories: synthetic surfactants, naturally occurring emulsifiers, absorption bases, and finely dispersed solids (see e.g., Ansel's Pharmaceutical Dosage Forms and Drug Delivery Systems, Allen, L V., Popovich N G., and Ansel H C., 2004, Lippincott Williams & Wilkins (8th ed.), New York, N.Y.; Idson, in Pharmaceutical Dosage Forms, Lieberman, Rieger and Banker (Eds.), 1988, Marcel Dekker, Inc., New York, N.Y., volume 1, p. 199).

[0518] Synthetic surfactants, also known as surface active agents, have found wide applicability in the formulation of emulsions and have been reviewed in the literature (see e.g., Ansel's Pharmaceutical Dosage Forms and Drug Delivery Systems, Allen, L V., Popovich N G., and Ansel H C., 2004, Lippincott Williams & Wilkins (8th ed.), New York, N.Y.; Rieger, in Pharmaceutical Dosage Forms, Lieberman, Rieger and Banker (Eds.), 1988, Marcel Dekker, Inc., New York, N.Y., volume 1, p. 285; Idson, in Pharmaceutical Dosage Forms, Lieberman, Rieger and Banker (Eds.), Marcel Dekker, Inc., New York, N.Y., 1988, volume 1, p. 199). Surfactants are typically amphiphilic and comprise a hydrophilic and a hydrophobic portion. The ratio of the hydrophilic to the hydrophobic nature of the surfactant has been termed the hydrophile/lipophile balance (HLB) and is a valuable tool in categorizing and selecting surfactants in the preparation of formulations. Surfactants may be classified into different classes based on the nature of the hydrophilic group: nonionic, anionic, cationic and amphoteric (see e.g., Ansel's Pharmaceutical Dosage Forms and Drug Delivery Systems, Allen, L V., Popovich N G., and Ansel H C., 2004, Lippincott Williams & Wilkins (8th ed.), New York, N.Y. Rieger, in Pharmaceutical Dosage Forms, Lieberman, Rieger and Banker (Eds.), 1988, Marcel Dekker, Inc., New York, N.Y., volume 1, p. 285).

[0519] Naturally occurring emulsifiers used in emulsion formulations include lanolin, beeswax, phosphatides, lecithin and acacia. Absorption bases possess hydrophilic properties such that they can soak up water to form w/o emulsions yet retain their semisolid consistencies, such as anhydrous lanolin and hydrophilic petrolatum. Finely divided solids have also been used as good emulsifiers especially in combination with surfactants and in viscous preparations. These include polar inorganic solids, such as heavy metal hydroxides, nonswelling clays such as bentonite, attapulgite, hectorite, kaolin, montmorillonite, colloidal aluminum silicate and colloidal magnesium aluminum silicate, pigments and nonpolar solids such as carbon or glyceryl tristearate.

[0520] A large variety of non-emulsifying materials are also included in emulsion formulations and contribute to the properties of emulsions. These include fats, oils, waxes, fatty acids, fatty alcohols, fatty esters, humectants, hydrophilic colloids, preservatives and antioxidants (Block, in Pharmaceutical Dosage Forms, Lieberman, Rieger and Banker (Eds.), 1988, Marcel Dekker, Inc., New York, N.Y., volume 1, p. 335; Idson, in Pharmaceutical Dosage Forms, Lieberman, Rieger and Banker (Eds.), 1988, Marcel Dekker, Inc., New York, N.Y., volume 1, p. 199).

[0521] Hydrophilic colloids or hydrocolloids include naturally occurring gums and synthetic polymers such as polysaccharides (for example, acacia, agar, alginic acid, carrageenan, guar gum, karaya gum, and tragacanth), cellulose derivatives (for example, carboxymethylcellulose and carboxypropylcellulose), and synthetic polymers (for example, carbomers, cellulose ethers, and carboxyvinyl polymers). These disperse or swell in water to form colloidal solutions that stabilize emulsions by forming strong interfacial films around the dispersed-phase droplets and by increasing the viscosity of the external phase.

[0522] Since emulsions often contain a number of ingredients such as carbohydrates, proteins, sterols and phosphatides that may readily support the growth of microbes, these formulations often incorporate preservatives. Commonly used preservatives included in emulsion formulations include methyl paraben, propyl paraben, quaternary ammonium salts, benzalkonium chloride, esters of p-hydroxybenzoic acid, and boric acid. Antioxidants are also commonly added to emulsion formulations to prevent deterioration of the formulation. Antioxidants used may be free radical scavengers such as tocopherols, alkyl gallates, butylated hydroxyanisole, butylated hydroxytoluene, or reducing agents such as ascorbic acid and sodium metabisulfite, and antioxidant synergists such as citric acid, tartaric acid, and lecithin.

[0523] The application of emulsion formulations via dermatological, oral and parenteral routes and methods for their manufacture have been reviewed in the literature (see e.g., Ansel's Pharmaceutical Dosage Forms and Drug Delivery Systems, Allen, L V., Popovich N G., and Ansel H C., 2004, Lippincott Williams & Wilkins (8th ed.), New York, N.Y.; Idson, in Pharmaceutical Dosage Forms, Lieberman, Rieger and Banker (Eds.), 1988, Marcel Dekker, Inc., New York, N.Y., volume 1, p. 199). Emulsion formulations for oral delivery have been very widely used because of ease of formulation, as well as efficacy from an absorption and bioavailability standpoint (see e.g., Ansel's Pharmaceutical Dosage Forms and Drug Delivery Systems, Allen, L V., Popovich N G., and Ansel H C., 2004, Lippincott Williams & Wilkins (8th ed.), New York, N.Y.; Rosoff, in Pharmaceutical Dosage Forms, Lieberman, Rieger and Banker (Eds.), 1988, Marcel Dekker, Inc., New York, N.Y., volume 1, p. 245; Idson, in Pharmaceutical Dosage Forms, Lieberman, Rieger and Banker (Eds.), 1988, Marcel Dekker, Inc., New York, N.Y., volume 1, p. 199). Mineral-oil base laxatives, oil-soluble vitamins and high fat nutritive preparations are among the materials that have commonly been administered orally as o/w emulsions.

[0524] In some embodiments of the present disclosure, the compositions of iRNAs and nucleic acids are formulated as microemulsions. A microemulsion may be defined as a system of water, oil and amphiphile which is a single optically isotropic and thermodynamically stable liquid solution (see e.g., Ansel's Pharmaceutical Dosage Forms and Drug Delivery Systems, Allen, L V., Popovich N G., and Ansel H C., 2004, Lippincott Williams & Wilkins (8th ed.), New York, N.Y.; Rosoff, in Pharmaceutical Dosage Forms, Lieberman, Rieger and Banker (Eds.), 1988, Marcel Dekker, Inc., New York, N.Y., volume 1, p. 245). Typically microemulsions are systems that are prepared by first dispersing an oil in an aqueous surfactant solution and then adding a sufficient amount of a fourth component, generally an intermediate chain-length alcohol to form a transparent system. Therefore, microemulsions have also been described as thermodynamically stable, isotopically clear dispersions of two immiscible liquids that are stabilized by interfacial films of surface-active molecules (Leung and Shah, in: Controlled Release of Drugs: Polymers and Aggregate Systems, Rosoff, M., Ed., 1989, VCH Publishers, New York, pages 185-215). Microemulsions commonly are prepared via a combination of three to five components that include oil, water, surfactant, cosurfactant and electrolyte. Whether the microemulsion is of the water-in-oil (w/o) or an oil-in-water (o/w) type is dependent on the properties of the oil and surfactant used and on the structure and geometric packing of the polar heads and hydrocarbon tails of the surfactant molecules (Schott, in Remington's Pharmaceutical Sciences, Mack Publishing Co., Easton, Pa., 1985, p. 271).

[0525] The phenomenological approach utilizing phase diagrams has been extensively studied and has yielded a comprehensive knowledge, to one skilled in the art, of how to formulate microemulsions (see e.g., Ansel's Pharmaceutical Dosage Forms and Drug Delivery Systems, Allen, L V., Popovich N G., and Ansel H C., 2004, Lippincott Williams & Wilkins (8th ed.), New York, N.Y.; Rosoff, in Pharmaceutical Dosage Forms, Lieberman, Rieger and Banker (Eds.), 1988, Marcel Dekker, Inc., New York, N.Y., volume 1, p. 245; Block, in Pharmaceutical Dosage Forms, Lieberman, Rieger and Banker (Eds.), 1988, Marcel Dekker, Inc., New York, N.Y., volume 1, p. 335). Compared to conventional emulsions, microemulsions offer the advantage of solubilizing water-insoluble drugs in a formulation of thermodynamically stable droplets that are formed spontaneously.

[0526] Surfactants used in the preparation of microemulsions include, but are not limited to, ionic surfactants, non-ionic surfactants, Brij 96, polyoxyethylene oleyl ethers, polyglycerol fatty acid esters, tetraglycerol monolaurate (ML310), tetraglycerol monooleate (MO310), hexaglycerol monooleate (PO310), hexaglycerol pentaoleate (PO500), decaglycerol monocaprate (MCA750), decaglycerol monooleate (M0750), decaglycerol sequioleate (SO750), decaglycerol decaoleate (DAO750), alone or in combination with cosurfactants. The cosurfactant, usually a short-chain alcohol such as ethanol, 1-propanol, and 1-butanol, serves to increase the interfacial fluidity by penetrating into the surfactant film and consequently creating a disordered film because of the void space generated among surfactant molecules. Microemulsions may, however, be prepared without the use of cosurfactants and alcohol-free self-emulsifying microemulsion systems are known in the art. The aqueous phase may typically be, but is not limited to, water, an aqueous solution of the drug, glycerol, PEG300, PEG400, polyglycerols, propylene glycols, and derivatives of ethylene glycol. The oil phase may include, but is not limited to, materials such as Captex 300, Captex 355, Capmul MCM, fatty acid esters, medium chain (C8-C12) mono, di, and tri-glycerides, polyoxyethylated glyceryl fatty acid esters, fatty alcohols, polyglycolized glycerides, saturated polyglycolized C8-C10 glycerides, vegetable oils and silicone oil.

[0527] Microemulsions are particularly of interest from the standpoint of drug solubilization and the enhanced absorption of drugs. Lipid based microemulsions (both o/w and w/o) have been proposed to enhance the oral bioavailability of drugs, including peptides (see e.g., U.S. Pat. Nos. 6,191,105; 7,063,860; 7,070,802; 7,157,099; Constantinides et al., Pharmaceutical Research, 1994, 11, 1385-1390; Ritschel, Meth. Find. Exp. Clin. Pharmacol., 1993, 13, 205). Microemulsions afford advantages of improved drug solubilization, protection of drug from enzymatic hydrolysis, possible enhancement of drug absorption due to surfactant-induced alterations in membrane fluidity and permeability, ease of preparation, ease of oral administration over solid dosage forms, improved clinical potency, and decreased toxicity (see e.g., U.S. Pat. Nos. 6,191,105; 7,063,860; 7,070,802; 7,157,099; Constantinides et al., Pharmaceutical Research, 1994, 11, 1385; Ho et al., J. Pharm. Sci., 1996, 85, 138-143). Often microemulsions may form spontaneously when their components are brought together at ambient temperature. This may be particularly advantageous when formulating thermolabile drugs, peptides or iRNAs. Microemulsions have also been effective in the transdermal delivery of active components in both cosmetic and pharmaceutical applications. It is expected that the microemulsion compositions and formulations of the present disclosure will facilitate the increased systemic absorption of iRNAs and nucleic acids from the gastrointestinal tract, as well as improve the local cellular uptake of iRNAs and nucleic acids.

[0528] Microemulsions of the present disclosure may also contain additional components and additives such as sorbitan monostearate (Grill 3), Labrasol, and penetration enhancers to improve the properties of the formulation and to enhance the absorption of the iRNAs and nucleic acids of the present disclosure. Penetration enhancers used in the microemulsions of the present disclosure may be classified as belonging to one of five broad categories—surfactants, fatty acids, bile salts, chelating agents, and non-chelating non-surfactants (Lee et al., Critical Reviews in Therapeutic Drug Carrier Systems, 1991, p. 92). Each of these classes has been discussed above.

[0529] Penetration Enhancers

[0530] In some embodiments, the present disclosure employs various penetration enhancers to effect the efficient delivery of nucleic acids, particularly iRNAs, to the skin of animals. Most drugs are present in solution in both ionized and nonionized forms. However, usually only lipid soluble or lipophilic drugs readily cross cell membranes. It has been discovered that even non-lipophilic drugs may cross cell membranes if the membrane to be crossed is treated with a penetration enhancer. In addition to aiding the diffusion of non-lipophilic drugs across cell membranes, penetration enhancers also enhance the permeability of lipophilic drugs.

[0531] Penetration enhancers may be classified as belonging to one of five broad categories, i.e., surfactants, fatty acids, bile salts, chelating agents, and non-chelating non-surfactants (see e.g., Malmsten, M. Surfactants and polymers in drug delivery, Informa Health Care, New York, N.Y., 2002; Lee et al., Critical Reviews in Therapeutic Drug Carrier Systems, 1991, p.92). Each of the above mentioned classes of penetration enhancers are described below in greater detail.

[0532] Surfactants: In connection with the present disclosure, surfactants (or “surface-active agents”) are chemical entities which, when dissolved in an aqueous solution, reduce the surface tension of the solution or the interfacial tension between the aqueous solution and another liquid, with the result that absorption of iRNAs through the mucosa is enhanced. In addition to bile salts and fatty acids, these penetration enhancers include, for example, sodium lauryl sulfate, polyoxyethylene-9-lauryl ether and polyoxyethylene-20-cetyl ether) (see e.g., Malmsten, M. Surfactants and polymers in drug delivery, Informa Health Care, New York, N.Y., 2002; Lee et al., Critical Reviews in Therapeutic Drug Carrier Systems, 1991, p.92); and perfluorochemical emulsions, such as FC-43. Takahashi et al., J. Pharm. Pharmacol., 1988, 40, 252).

[0533] Fatty acids: Various fatty acids and their derivatives which act as penetration enhancers include, for example, oleic acid, lauric acid, capric acid (n-decanoic acid), myristic acid, palmitic acid, stearic acid, linoleic acid, linolenic acid, dicaprate, tricaprate, monoolein (1-monooleoyl-rac-glycerol), dilaurin, caprylic acid, arachidonic acid, glycerol 1-monocaprate, 1-dodecylazacycloheptan-2-one, acylcarnitines, acylcholines, C₁₋₂₀ alkyl esters thereof (e.g., methyl, isopropyl and t-butyl), and mono- and di-glycerides thereof (i.e., oleate, laurate, caprate, myristate, palmitate, stearate, linoleate, etc.) (see e.g., Touitou, E., et al. Enhancement in Drug Delivery, CRC Press, Danvers, Mass., 2006; Lee et al., Critical Reviews in Therapeutic Drug Carrier Systems, 1991, p.92; Muranishi, Critical Reviews in Therapeutic Drug Carrier Systems, 1990, 7, 1-33; El Hariri et al., J. Pharm. Pharmacol., 1992, 44, 651-654).

[0534] Bile salts: The physiological role of bile includes the facilitation of dispersion and absorption of lipids and fat-soluble vitamins (see e.g., Malmsten, M. Surfactants and polymers in drug delivery, Informa Health Care, New York, N.Y., 2002; Brunton, Chapter 38 in: Goodman & Gilman's The Pharmacological Basis of Therapeutics, 9th Ed., Hardman et al. Eds., McGraw-Hill, New York, 1996, pp. 934-935). Various natural bile salts, and their synthetic derivatives, act as penetration enhancers. Thus the term “bile salts” includes any of the naturally occurring components of bile as well as any of their synthetic derivatives. Suitable bile salts include, for example, cholic acid (or its pharmaceutically acceptable sodium salt, sodium cholate), dehydrocholic acid (sodium dehydrocholate), deoxycholic acid (sodium deoxycholate), glucholic acid (sodium glucholate), glycholic acid (sodium glycocholate), glycodeoxycholic acid (sodium glycodeoxycholate), taurocholic acid (sodium taurocholate), taurodeoxycholic acid (sodium taurodeoxycholate), chenodeoxycholic acid (sodium chenodeoxycholate), ursodeoxycholic acid (UDCA), sodium tauro-24,25-dihydro-fusidate (STDHF), sodium glycodihydrofusidate and polyoxyethylene-9-lauryl ether (POE) (see e.g., Malmsten, M. Surfactants and polymers in drug delivery, Informa Health Care, New York, N.Y., 2002; Lee et al., Critical Reviews in Therapeutic Drug Carrier Systems, 1991, page 92; Swinyard, Chapter 39 In: Remington's Pharmaceutical Sciences, 18th Ed., Gennaro, ed., Mack Publishing Co., Easton, Pa., 1990, pages 782-783; Muranishi, Critical Reviews in Therapeutic Drug Carrier Systems, 1990, 7, 1-33; Yamamoto et al., J. Pharm. Exp. Ther., 1992, 263, 25; Yamashita et al., J. Pharm. Sci., 1990, 79, 579-583).

[0535] Chelating Agents: Chelating agents, as used in connection with the present disclosure, can be defined as compounds that remove metallic ions from solution by forming complexes therewith, with the result that absorption of iRNAs through the mucosa is enhanced. With regards to their use as penetration enhancers in the present disclosure, chelating agents have the added advantage of also serving as DNase inhibitors, as most characterized DNA nucleases require a divalent metal ion for catalysis and are thus inhibited by chelating agents (Jarrett, J. Chromatogr., 1993, 618, 315-339). Suitable chelating agents include but are not limited to disodium ethylenediaminetetraacetate (EDTA), citric acid, salicylates (e.g., sodium salicylate, 5-methoxysalicylate and homovanilate), N-acyl derivatives of collagen, laureth-9 and N-amino acyl derivatives of β-diketones (enamines)(see e.g., Katdare, A. et al., Excipient development for pharmaceutical, biotechnology, and drug delivery, CRC Press, Danvers, Mass., 2006; Lee et al., Critical Reviews in Therapeutic Drug Carrier Systems, 1991, page 92; Muranishi, Critical Reviews in Therapeutic Drug Carrier Systems, 1990, 7, 1-33; Buur et al., J. Control Rel., 1990, 14, 43-51).

[0536] Non-chelating non-surfactants: As used herein, non-chelating non-surfactant penetration enhancing compounds can be defined as compounds that demonstrate insignificant activity as chelating agents or as surfactants but that nonetheless enhance absorption of iRNAs through the alimentary mucosa (see e.g., Muranishi, Critical Reviews in Therapeutic Drug Carrier Systems, 1990, 7, 1-33). This class of penetration enhancers include, for example, unsaturated cyclic ureas, 1-alkyl- and 1-alkenylazacyclo-alkanone derivatives (Lee et al., Critical Reviews in Therapeutic Drug Carrier Systems, 1991, page 92); and non-steroidal anti-inflammatory agents such as diclofenac sodium, indomethacin and phenylbutazone (Yamashita et al., J. Pharm. Pharmacol., 1987, 39, 621-626).

[0537] Agents that enhance uptake of iRNAs at the cellular level may also be added to the pharmaceutical and other compositions of the present disclosure. For example, cationic lipids, such as lipofectin (Junichi et al, U.S. Pat. No. 5,705,188), cationic glycerol derivatives, and polycationic molecules, such as polylysine (Lollo et al., PCT Application WO 97/30731), are also known to enhance the cellular uptake of dsRNAs. Examples of commercially available transfection reagents include, for example Lipofectamine™ (Invitrogen; Carlsbad, Calif.), Lipofectamine 2000™ (Invitrogen; Carlsbad, Calif.), 293fectin™ (Invitrogen; Carlsbad, Calif.), Cellfectin™ (Invitrogen; Carlsbad, Calif.), DMRIE-C™ (Invitrogen; Carlsbad, Calif.), FreeStyle™ MAX (Invitrogen; Carlsbad, Calif.), Lipofectamine™ 2000 CD (Invitrogen; Carlsbad, Calif.), Lipofectamine™ (Invitrogen; Carlsbad, Calif.), RNAiMAX (Invitrogen; Carlsbad, Calif.), Oligofectamine™ (Invitrogen; Carlsbad, Calif.), Optifect™ (Invitrogen; Carlsbad, Calif.), X-tremeGENE Q2 Transfection Reagent (Roche; Grenzacherstrasse, Switzerland), DOTAP Liposomal Transfection Reagent (Grenzacherstrasse, Switzerland), DOSPER Liposomal Transfection Reagent (Grenzacherstrasse, Switzerland), or Fugene (Grenzacherstrasse, Switzerland), Transfectam® Reagent (Promega; Madison, Wis.), TransFast™ Transfection Reagent (Promega; Madison, Wis.), Tfx™-20 Reagent (Promega; Madison, Wis.), Tfx™-50 Reagent (Promega; Madison, Wis.), DreamFect™ (OZ Biosciences; Marseille, France), EcoTransfect (OZ Biosciences; Marseille, France), TransPass^{a} D1 Transfection Reagent (New England Biolabs; Ipswich, Mass., USA), LyoVec™/LipoGen™ (Invivogen; San Diego, Calif., USA), PerFectin Transfection Reagent (Genlantis; San Diego, Calif., USA), NeuroPORTER Transfection Reagent (Genlantis; San Diego, Calif., USA), GenePORTER Transfection reagent (Genlantis; San Diego, Calif., USA), GenePORTER 2 Transfection reagent (Genlantis; San Diego, Calif., USA), Cytofectin Transfection Reagent (Genlantis; San Diego, Calif., USA), BaculoPORTER Transfection Reagent (Genlantis; San Diego, Calif., USA), TroganPORTER™ transfection Reagent (Genlantis; San Diego, Calif., USA), RiboFect (Bioline; Taunton, Mass., USA), PlasFect (Bioline; Taunton, Mass., USA), UniFECTOR (B-Bridge International; Mountain View, Calif., USA), SureFECTOR (B-Bridge International; Mountain View, Calif., USA), or HiFect™ (B-Bridge International, Mountain View, Calif., USA), among others.

[0538] Other agents may be utilized to enhance the penetration of the administered nucleic acids, including glycols such as ethylene glycol and propylene glycol, pyrrols such as 2-pyrrol, azones, and terpenes such as limonene and menthone.

[0539] Carriers

[0540] Certain compositions of the present disclosure also incorporate carrier compounds in the formulation. As used herein, “carrier compound” can refer to a nucleic acid, or analog thereof, which is inert (i.e., does not possess biological activity per se) but is recognized as a nucleic acid by in vivo processes that reduce the bioavailability of a nucleic acid having biological activity by, for example, degrading the biologically active nucleic acid or promoting its removal from circulation. The coadministration of a nucleic acid and a carrier compound, typically with an excess of the latter substance, can result in a substantial reduction of the amount of nucleic acid recovered in the liver, kidney or other extracirculatory reservoirs, presumably due to competition between the carrier compound and the nucleic acid for a common receptor. For example, the recovery of a partially phosphorothioate dsRNA in hepatic tissue can be reduced when it is coadministered with polyinosinic acid, dextran sulfate, polycytidic acid or 4-acetamido-4′isothiocyano-stilbene-2,2′-disulfonic acid (Miyao et al., DsRNA Res. Dev., 1995, 5, 115-121; Takakura et al., DsRNA & Nucl. Acid Drug Dev., 1996, 6, 177-183).

[0541] Excipients

[0542] In contrast to a carrier compound, a pharmaceutical carrier or excipient may comprise, e.g., a pharmaceutically acceptable solvent, suspending agent or any other pharmacologically inert vehicle for delivering one or more nucleic acids to an animal. The excipient may be liquid or solid and is selected, with the planned manner of administration in mind, so as to provide for the desired bulk, consistency, etc., when combined with a nucleic acid and the other components of a given pharmaceutical composition. Typical pharmaceutical carriers include, but are not limited to, binding agents (e.g., pregelatinized maize starch, polyvinylpyrrolidone or hydroxypropyl methylcellulose, etc.); fillers (e.g., lactose and other sugars, microcrystalline cellulose, pectin, gelatin, calcium sulfate, ethyl cellulose, polyacrylates or calcium hydrogen phosphate, etc.); lubricants (e.g., magnesium stearate, talc, silica, colloidal silicon dioxide, stearic acid, metallic stearates, hydrogenated vegetable oils, corn starch, polyethylene glycols, sodium benzoate, sodium acetate, etc.); disintegrants (e.g., starch, sodium starch glycolate, etc.); and wetting agents (e.g., sodium lauryl sulphate, etc).

[0543] Pharmaceutically acceptable organic or inorganic excipients suitable for non-parenteral administration which do not deleteriously react with nucleic acids can also be used to formulate the compositions of the present disclosure. Suitable pharmaceutically acceptable carriers include, but are not limited to, water, salt solutions, alcohols, polyethylene glycols, gelatin, lactose, amylose, magnesium stearate, talc, silicic acid, viscous paraffin, hydroxymethylcellulose, polyvinylpyrrolidone and the like.

[0544] Formulations for topical administration of nucleic acids may include sterile and non-sterile aqueous solutions, non-aqueous solutions in common solvents such as alcohols, or solutions of the nucleic acids in liquid or solid oil bases. The solutions may also contain buffers, diluents and other suitable additives. Pharmaceutically acceptable organic or inorganic excipients suitable for non-parenteral administration which do not deleteriously react with nucleic acids can be used.

[0545] Suitable pharmaceutically acceptable excipients include, but are not limited to, water, salt solutions, alcohol, polyethylene glycols, gelatin, lactose, amylose, magnesium stearate, talc, silicic acid, viscous paraffin, hydroxymethylcellulose, polyvinylpyrrolidone and the like.

[0546] Other Components

[0547] The compositions of the present disclosure may additionally contain other adjunct components conventionally found in pharmaceutical compositions, e.g., at their art-established usage levels. Thus, for example, the compositions may contain additional, compatible, pharmaceutically-active materials such as, for example, antipruritics, astringents, local anesthetics or anti-inflammatory agents, or may contain additional materials useful in physically formulating various dosage forms of the compositions of the present disclosure, such as dyes, flavoring agents, preservatives, antioxidants, opacifiers, thickening agents and stabilizers. However, such materials, when added, should not unduly interfere with the biological activities of the components of the compositions of the present disclosure. The formulations can be sterilized and, if desired, mixed with auxiliary agents, e.g., lubricants, preservatives, stabilizers, wetting agents, emulsifiers, salts for influencing osmotic pressure, buffers, colorings, flavorings and/or aromatic substances and the like which do not deleteriously interact with the nucleic acid(s) of the formulation.

[0548] Aqueous suspensions may contain substances that increase the viscosity of the suspension including, for example, sodium carboxymethylcellulose, sorbitol and/or dextran. The suspension may also contain stabilizers.

[0549] In some embodiments, pharmaceutical compositions featured in the disclosure include (a) one or more iRNA compounds and (b) one or more biologic agents which function by a non-RNAi mechanism. Examples of such biologic agents include agents that interfere with an interaction of MARC1 and at least one MARC1 binding partner.

[0550] Toxicity and therapeutic efficacy of such compounds can be determined by standard pharmaceutical procedures in cell cultures or experimental animals, e.g., for determining the LD50 (the dose lethal to 50% of the population) and the ED50 (the dose therapeutically effective in 50% of the population). The dose ratio between toxic and therapeutic effects is the therapeutic index and it can be expressed as the ratio LD50/ED50. Compounds that exhibit high therapeutic indices are typical.

[0551] The data obtained from cell culture assays and animal studies can be used in formulating a range of dosage for use in humans. The dosage of compositions featured in the disclosure lies generally within a range of circulating concentrations that include the ED50 with little or no toxicity. The dosage may vary within this range depending upon the dosage form employed and the route of administration utilized. For any compound used in the methods featured in the disclosure, the therapeutically effective dose can be estimated initially from cell culture assays. A dose may be formulated in animal models to achieve a circulating plasma concentration range of the compound or, when appropriate, of the polypeptide product of a target sequence (e.g., achieving a decreased concentration of the polypeptide) that includes the IC50 (i.e., the concentration of the test compound which achieves a half-maximal inhibition of symptoms) as determined in cell culture. Such information can be used to more accurately determine useful doses in humans. Levels in plasma may be measured, for example, by high performance liquid chromatography.

[0552] In addition to their administration, as discussed above, the iRNAs featured in the disclosure can be administered in combination with other known agents effective in treatment of diseases or disorders related to MARC1 expression. In any event, the administering physician can adjust the amount and timing of iRNA administration on the basis of results observed using standard measures of efficacy known in the art or described herein.

[0553] Methods of Treating Disorders Related to Expression of a MARC1 Gene

[0554] The present disclosure relates to the use of an iRNA targeting MARC1 to inhibit MARC1 expression and/or to treat a disease, disorder, or pathological process that is related to MARC1 expression.

[0555] In some aspects, a method of treatment of a disorder related to expression of MARC1 is provided, the method comprising administering an iRNA (e.g., a dsRNA) disclosed herein to a subject in need thereof. In some embodiments, the iRNA inhibits (decreases) MARC1 expression.

[0556] In some embodiments, the subject is an animal that serves as a model for a disorder related to MARC1 expression, e.g., a liver disease or disorder, e.g., hepatic fibrosis or a metabolic disorder (e.g., nonalcoholic fatty liver disease (NAFLD), or a non-alcoholic liver steatohepatitis (NASH)).

[0557] In some embodiments, a MARC1-associated disorder is a liver disease or disorder, e.g., a chronic liver disease or disorder. In some embodiments the liver disease or disorder is hepatic fibrosis, liver inflammation, hepatocellular necrosis, cirrhosis, hepatitis, steatohepatitis, nonalcoholic fatty liver disease (NAFLD), nonalcoholic steatohepatitis (NASH), or acute fatty liver of pregnancy. In some embodiments, a MARC1-associated disorder is a metabolic disorder. In some embodiments, the metabolic disorder is fatty liver (hepatic steatosis), non-alcoholic fatty liver disease (NAFLD), non-alcoholic liver steatohepatitis (NASH), obesity, diabetes, insulin resistance, alcoholic fatty liver disease, hyperlipidemia, dyslipidemia, steatosis (e.g., liver steatosis, heart steatosis, kidney steatosis, muscle steatosis), or abeta-lipoproteinemia. In some embodiments, the metabolic disorder is a disorder associated with elevated serum cholesterol levels such as hypertension, hypercholesterolemia, cardiovascular disorders and/or diseases (e.g. coronary artery disease, coronary heart disease (CHD), cerebrovascular disease (CVD), atherosclerosis, aortic stenosis, peripheral vascular disease, arteriosclerosis, myocardial infarction (heart attack), cerebrovascular diseases (stroke), transient ischemic attacks (TIA), angina (stable and unstable), atrial fibrillation, arrhythmia, valvular disease, congestive heart failure, hypercholesterolemia, type I hyperlipoproteinemia, type II hyperlipoproteinemia, type III hyperlipoproteinemia, type IV hyperlipoproteinemia, type V hyperlipoproteinemia, secondary hypertriglyceridemia, or familial lecithin cholesterol acyltransferase deficiency). In some embodiments, the MARC1-associated disorder is hepatic fibrosis or a metabolic disorder, e.g., non-alcoholic fatty liver disease (NAFLD), non-alcoholic liver steatohepatitis (NASH).

[0558] Hepatic Fibrosis

[0559] In some embodiments, the disorder related to MARC1 expression is hepatic fibrosis.

[0560] Hepatic fibrosis typically occurs when an abnormal amount of fibrous connective tissue is produced as the result of inflammation, irritation, or healing caused by an underlying acute or chronic liver condition. In some embodiments fibrosis comprises fibroblast accumulation and collagen deposition. Fibroblasts are connective tissue cells, which are dispersed in connective tissue throughout the body. Fibroblasts secrete a nonrigid ECM containing type I and/or type III collagen. In response to an injury to a tissue, nearby fibroblasts migrate into the wound, proliferate, and produce large amounts of collagenous extracellular matrix. Collagen is a fibrous protein rich in glycine and proline that is a major component of the extracellular matrix and connective tissue, cartilage, and bone. Collagen molecules are triple-stranded helical structures called α-chains, which are wound around each other in a ropelike helix. Collagen exists in several forms or types; of these, type I, the most common, is found in skin, tendon, and bone; and type III is found in skin, blood vessels, and internal organs. In some embodiments, hepatic fibrosis is a result of a viral or other infection, an autoimmune disorder, a bile duct obstruction, metabolic disorders, alcohol abuse, primary biliary cirrhosis, nonalcoholic fatty liver disease (NAFLD), non-alcoholic steatohepatitis (NASH), exposure to one or more chemicals, or cancer. The pathology of hepatic fibrosis can range from indolent and/or mild to clinically significant and/or severe. In some embodiments, hepatic fibrosis progresses from hepatitis, e.g., acute or chronic hepatitis. In some embodiments, hepatic fibrosis progresses to liver cirrhosis. In some embodiments, a subject described herein has hepatitis, e.g., acute or chronic hepatitis. In some embodiments, a subject described herein has liver cirrhosis.

[0561] In some embodiments, the subject having or diagnosed with having hepatic fibrosis is less than 18 years old. In some embodiments, the subject having or diagnosed with having hepatic fibrosis is an adult. In some embodiments, the subject is or is identified as having a higher level of MARC1 expression (e.g., expression of a MARC1 gene, a MARC1 mRNA, or a MARC1 protein) compared to a subject without the disorder.

[0562] In some embodiments, hepatic fibrosis is diagnosed by laboratory tests and/or liver function tests, e.g., a blood test, a liver biopsy, a Doppler ultrasonography, a CT and/or an MRI and cholangiography (x-rays of the bile ducts). In some embodiments, the blood test include one or more of a serum bilirubin test, a serum albumin test, a serum alkaline phosphatase test, a serum aminotransferases (transaminases) test, a prothrombin time (PTT) test, an alanine transaminase (ALT) test, an aspartate transaminase (AST) test, gamma-glutamyl transpeptidase test, a lactic dehydrogenase test, a 5-nucleotidase test, an alpha-fetoprotein test, and a mitochondrial antibodies test.

[0563] Nonalcoholic Fatty Liver Disease (NAFLD)

[0564] In some embodiments, the disorder associated with MARC1 expression is nonalcoholic fatty liver disease (NAFLD).

[0565] NAFLD is frequently characterized by deposition adipose tissue in the liver, and can progress to steatosis and abnormal lipid accumulation in the liver. The pathology can range from indolent and clinically insignificant to more progressive steatosis, e.g., non-alcoholic steatohepatitis (NASH), fibrosis, and occasionally hepatocellular carcinoma (HCC).

[0566] In some embodiments, a subject having NAFLD does not engage in excessive alcohol consumption. In some embodiments, a subject having, or at risk of having, NAFLD has one or more risk factors including but not limited to, insulin resistance and type 2 diabetes mellitus, sedentary life-style, obesity, high-fat diet, high-cholesterol, sleep apnea, polycystic ovary syndrome, high levels of triglycerides in the blood, hyperuricemia, hypothyroidism, and hypopituitarism. In some embodiments, NAFLD is caused by an unknown etiology, e.g., no known causes for secondary hepatic fat accumulation. In some embodiments, NAFLD is frequently histologically characterized as non-alcoholic fatty liver (NAFL) or more severe nonalcoholic steatohepatitis (NASH). In some embodiments, NAFL is typically characterized by the presence of hepatic steatosis with no evidence of hepatocellular injury in the form of ballooning hepatocytes. In some embodiments, NASH is typically characterized by the presence of hepatic steatosis and inflammation with hepatocyte injury (ballooning) with or without fibrosis. In some embodiments, NAFLD is clinically indolent and slow progressing. In some embodiments, NAFLD is clinically significant and progresses rapidly, e.g., to fibrosis and/or cirrhosis, e.g., cirrhotic end-stage disease.

[0567] In some embodiments, the subject having or diagnosed with having NAFLD is less than 18 years old. In some embodiments, the subject having or diagnosed with having NAFLD is an adult. In some embodiments, the subject is or is identified as having a higher level of MARC1 expression (e.g., expression of a MARC1 gene, a MARC1 mRNA, or a MARC1 protein) compared to a subject without the disorder.

[0568] In some embodiments, NAFLD is diagnosed by laboratory tests and/or liver function tests, e.g., a blood test, a liver biopsy, a Doppler ultrasonography, a CT and/or an MRI and cholangiography (x-rays of the bile ducts). In some embodiments, the blood test include one or more of a serum bilirubin test, a serum albumin test, a serum alkaline phosphatase test, a serum aminotransferases (transaminases) test, a prothrombin time (PTT) test, an alanine transaminase (ALT) test, an aspartate transaminase (AST) test, gamma-glutamyl transpeptidase test, a lactic dehydrogenase test, a 5-nucleotidase test, an alpha-fetoprotein test, and a mitochondrial antibodies test. In some embodiments, NAFLD Activity Score (NAS), e.g., a measure of steatosis, activity, and fibrosis, is used to stage and grade NAFLD in a subject.

[0569] Non-Alcoholic Steatohepatitis (NASH)

[0570] In some embodiments, the disorder associated with MARC1 expression is non-alcoholic steatohepatitis (NASH).

[0571] In some embodiments, severe nonalcoholic fatty liver disease (NAFLD) progresses to NASH. In some embodiments, NASH causes liver inflammation, hepatocyte damage, and progression to cirrhosis. In some embodiments, a subject described herein has liver inflammation, hepatocyte damage, or cirrhosis. In some embodiments, NASH is typically characterized by the presence of hepatic steatosis and inflammation with hepatocyte injury (ballooning) with or without fibrosis. In some embodiments, a subject having NASH does not engage in excessive alcohol consumption. In some embodiments, NASH has one or more risk factors including but not limited to, insulin resistance and type 2 diabetes mellitus, dyslipidemia, a sedentary life-style, obesity, high-fat diet, high-cholesterol, sleep apnea, polycystic ovary syndrome, high levels of triglycerides in the blood, hypothyroidism, and hypopituitarism. In some embodiments, NASH is caused by an unknown etiology.

[0572] In some embodiments, the subject having or diagnosed with having NASH is less than 18 years old. In some embodiments, the subject having or diagnosed with having NASH is an adult. In some embodiments, the subject is or is identified as having a higher level of MARC1 expression (e.g., expression of a MARC1 gene, a MARC1 mRNA, or a MARC1 protein) compared to a subject without the disorder.

[0573] In some embodiments, NASH is diagnosed by laboratory tests and/or liver function tests, e.g., a blood test, a liver biopsy, a Doppler ultrasonography, a CT and/or an MRI and cholangiography (x-rays of the bile ducts). In some embodiments, the blood test include one or more of a serum bilirubin test, a serum albumin test, a serum alkaline phosphatase test, a serum aminotransferases (transaminases) test, a prothrombin time (PTT) test, an alanine transaminase (ALT) test, an aspartate transaminase (AST) test, gamma-glutamyl transpeptidase test, a lactic dehydrogenase test, a 5-nucleotidase test, an alpha-fetoprotein test, and a mitochondrial antibodies test. In some embodiments, a NAFLD Activity Score (NAS), e.g., a measure of steatosis, activity, and fibrosis, is used to determine the progression from NAFLD to NASH in a subject. In some embodiments, if a subject has a NAS score of 5 or great, this is indicative of NASH.

[0574] Combination Therapies

[0575] In some embodiments, an iRNA (e.g., a dsRNA) disclosed herein is administered in combination with a second therapy (e.g., one or more additional therapies) known to be effective in treating a disorder related to MARC1 expression (e.g., hepatic fibrosis or a metabolic disorder (e.g., nonalcoholic fatty liver disease (NAFLD) or non-alcoholic steatohepatitis (NASH)) or a symptom of such a disorder. The iRNA may be administered before, after, or concurrent with the second therapy. In some embodiments, the iRNA is administered before the second therapy. In some embodiments, the iRNA is administered after the second therapy. In some embodiments, the iRNA is administered concurrent with the second therapy.

[0576] The second therapy may be an additional therapeutic agent. The iRNA and the additional therapeutic agent can be administered in combination in the same composition or the additional therapeutic agent can be administered as part of a separate composition.

[0577] In some embodiments, the second therapy is a non-iRNA therapeutic agent that is effective to treat the disorder or symptoms of the disorder.

[0578] In some embodiments, the iRNA is administered in conjunction with a therapy, e.g., altered diet, weight loss, reduction or discontinuance of the consumption of alcohol, increased exercise, surgical liver resection, vitamin E, pioglitazone, anti-viral agents (e.g., lamivudine, interferon-alpha, ribavirin, or adefovir, or corticosteroids.

[0579] Administration Dosages, Routes, and Timing

[0580] A subject (e.g., a human subject, e.g., a patient) can be administered a therapeutic amount of iRNA. The therapeutic amount can be, e.g., 0.05-50 mg/kg. For example, the therapeutic amount can be 0.05, 0.1, 0.2, 0.3, 0.4, 0.5, 0.6, 0.7, 0.8, 0.9, 1.0, 1.5, 2.0, or 2.5, 3.0, 3.5, 4.0, 4.5, 5, 10, 15, 20, 25, 30, 35, 40, 45, or 50 mg/kg dsRNA.

[0581] In some embodiments, the iRNA is formulated for delivery to a target organ, e.g., to the liver.

[0582] In some embodiments, the iRNA is formulated as a lipid formulation, e.g., an LNP formulation as described herein. In some such embodiments, the therapeutic amount is 0.05-5 mg/kg, e.g., 0.05, 0.1, 0.2, 0.3, 0.4, 0.5, 0.6, 0.7, 0.8, 0.9, 1.0, 1.5, 2.0, 2.5, 3.0, 3.5, 4.0, 4.5, or 5.0 mg/kg dsRNA. In some embodiments, the lipid formulation, e.g., LNP formulation, is administered intravenously. In some embodiments, the iRNA (e.g., dsRNA) is formulated as an LNP formulation and is administered (e.g., intravenously administered) at a dose of 0.1 to 0.5 mg/kg.

[0583] In some embodiments, the iRNA is administered by intravenous infusion over a period of time, such as over a 5 minute, 10 minute, 15 minute, 20 minute, or 25 minute period. In some embodiments, the iRNA is in the form of a GalNAc conjugate as described herein. In some such embodiments, the therapeutic amount is 0.5-50 mg, e.g., 0.5, 0.6, 0.7, 0.8, 0.9, 1.0, 1.5, 2.0, 2.5, 3.0, 3.5, 4.0, 4.5, 5.0, 6, 7, 8, 9, 10, 15, 20, 25, 30, 35, 40, 45, or 50 mg/kg dsRNA. In some embodiments, the GalNAc conjugate is administered subcutaneously. In some embodiments, the iRNA (e.g., dsRNA) is in the form of a GalNAc conjugate and is administered (e.g., subcutaneously administered) at a dose of 1 to 10 mg/kg.

[0584] In some embodiments, the administration is repeated, for example, on a regular basis, such as, daily, biweekly (i.e., every two weeks) for one month, two months, three months, four months, six months or longer. After an initial treatment regimen, the treatments can be administered on a less frequent basis. For example, after administration biweekly for three months, administration can be repeated once per month, for six months or a year or longer.

[0585] In some embodiments, the iRNA agent is administered in two or more doses. In some embodiments, the number or amount of subsequent doses is dependent on the achievement of a desired effect, e.g., to increase anti-tumor response, or the achievement of a therapeutic or prophylactic effect, e.g., reduction or prevention of one or more symptoms associated with the disorder.

[0586] In some embodiments, the iRNA agent is administered according to a schedule. For example, the iRNA agent may be administered once per week, twice per week, three times per week, four times per week, or five times per week. In some embodiments, the schedule involves regularly spaced administrations, e.g., hourly, every four hours, every six hours, every eight hours, every twelve hours, daily, every 2 days, every 3 days, every 4 days, every 5 days, weekly, biweekly, or monthly. In some embodiments, the iRNA agent is administered at the frequency required to achieve a desired effect.

[0587] In some embodiments, the schedule involves closely spaced administrations followed by a longer period of time during which the agent is not administered. For example, the schedule may involve an initial set of doses that are administered in a relatively short period of time (e.g., about every 6 hours, about every 12 hours, about every 24 hours, about every 48 hours, or about every 72 hours) followed by a longer time period (e.g., about 1 week, about 2 weeks, about 3 weeks, about 4 weeks, about 5 weeks, about 6 weeks, about 7 weeks, or about 8 weeks) during which the iRNA agent is not administered. In some embodiments, the iRNA agent is initially administered hourly and is later administered at a longer interval (e.g., daily, weekly, biweekly, or monthly). In some embodiments, the iRNA agent is initially administered daily and is later administered at a longer interval (e.g., weekly, biweekly, or monthly). In certain embodiments, the longer interval increases over time or is determined based on the achievement of a desired effect.

[0588] Before administration of a full dose of the iRNA, patients can be administered a smaller dose, such as a 5% infusion dose, and monitored for adverse effects, such as an allergic reaction, or for elevated lipid levels or blood pressure. In another example, the patient can be monitored for unwanted effects.

[0589] Methods for Modulating Expression of a MARC1 Gene

[0590] In some aspects, the disclosure provides a method for modulating (e.g., inhibiting or activating) the expression of MARC1 gene, e.g., in a cell or in a subject. In some embodiments, the cell is ex vivo, in vitro, or in vivo. In some embodiments, the cell is in the liver (e.g., a hepatocyte). In some embodiments, the cell is in a subject (e.g., a mammal, such as, for example, a human). In some embodiments, the subject (e.g., the human) is at risk, or is diagnosed with a disorder related to expression of MARC1 expression, as described herein. In some embodiments, the method includes contacting the cell with an iRNA as described herein, in an amount effective to decrease the expression of a MARC1 gene in the cell.

[0591] The expression of a MARC1 gene may be assessed based on the level of expression of a MARC1 mRNA, a MARC1 protein, or the level of another parameter functionally linked to the level of expression of a MARC1 gene. In some embodiments, the expression of MARC1 is inhibited by at least 5%, at least 10%, at least 15%, at least 20%, at least 25%, at least 30%, at least 35%, at least 40%, at least 45%, at least 50%, at least 55%, at least 60%, at least 65%, at least 70%, at least 75%, at least 80%, at least 85%, at least 90%, or at least 95%. In some embodiments, the iRNA has an IC₅₀ in the range of 0.001-0.01 nM, 0.001-0.10 nM, 0.001-1.0 nM, 0.001-10 nM, 0.01-0.05 nM, 0.01-0.50 nM, 0.02-0.60 nM, 0.01-1.0 nM, 0.01-1.5 nM, 0.01-10 nM. The IC₅₀ value may be normalized relative to an appropriate control value, e.g., the IC₅₀ of a non-targeting iRNA.

[0592] In some embodiments, the method includes introducing into the cell an iRNA as described herein and maintaining the cell for a time sufficient to obtain degradation of the mRNA transcript of a MARC1 gene, thereby inhibiting the expression of the MARC1 gene in the cell.

[0593] In some embodiments, the method includes administering a composition described herein, e.g., a composition comprising an iRNA that targets MARC1, to the mammal such that expression of the target MARC1 gene is decreased, such as for an extended duration, e.g., at least two, three, four days or more, e.g., one week, two weeks, three weeks, or four weeks or longer. In some embodiments, the decrease in expression of MARC1 is detectable within 1 hour, 2 hours, 4 hours, 8 hours, 12 hours, or 24 hours of the first administration.

[0594] In some embodiments, the method includes administering a composition as described herein to a mammal such that expression of the target MARC1 is increased by e.g., at least 10% compared to an untreated animal. In some embodiments, the activation of MARC1 occurs over an extended duration, e.g., at least two, three, four days or more, e.g., one week, two weeks, three weeks, four weeks, or more. Without wishing to be bound by theory, an iRNA can activate MARC1 expression by stabilizing the MARC1 mRNA transcript, interacting with a promoter in the genome, or inhibiting an inhibitor of MARC1 expression.

[0595] The iRNAs useful for the methods and compositions featured in the disclosure specifically target RNAs (primary or processed) of a MARC1 gene. Compositions and methods for inhibiting the expression of a MARC1 gene using iRNAs can be prepared and performed as described elsewhere herein.

[0596] In some embodiments, the method includes administering a composition containing an iRNA, where the iRNA includes a nucleotide sequence that is complementary to at least a part of an RNA transcript of the MARC1 gene of the subject, e.g., the mammal, e.g., the human, to be treated. The composition may be administered by any appropriate means known in the art including, but not limited to oral, intraperitoneal, or parenteral routes, including intracranial (e.g., intraventricular, intraparenchymal and intrathecal), intravenous, intramuscular, subcutaneous, transdermal, airway (aerosol), nasal, rectal, and topical (including buccal and sublingual) administration.

[0597] In certain embodiments, the composition is administered by intravenous infusion or injection. In some such embodiments, the composition comprises a lipid formulated siRNA (e.g., an LNP formulation, such as an LNP11 formulation) for intravenous infusion.

[0598] In other embodiments, the composition is administered subcutaneously. In some such embodiments, the composition comprises an iRNA conjugated to a GalNAc ligand. In some such embodiments, the ligand targets the iRNA to the liver (e.g., to hepatocytes).

[0599] Unless otherwise defined, all technical and scientific terms used herein have the same meaning as commonly understood by one of ordinary skill in the art to which this disclosure belongs. Although methods and materials similar or equivalent to those described herein can be used in the practice or testing of the iRNAs and methods featured in the disclosure, suitable methods and materials are described below. All publications, patent applications, patents, and other references mentioned herein are incorporated by reference in their entirety. In case of conflict, the present specification, including definitions, will control. In addition, the materials, methods, and examples are illustrative only and not intended to be limiting.

### SPECIFIC EMBODIMENTS

[0600] 1. A double stranded ribonucleic acid (dsRNA) agent for inhibiting expression of MARC1 gene, wherein the dsRNA agent comprises a sense strand and an antisense strand forming a double stranded region, wherein the sense strand comprises a nucleotide sequence comprising at least 15 contiguous nucleotides, with 0, 1, 2, or 3 mismatches, of a portion of a coding strand of human MARC1 gene and the antisense strand comprises a nucleotide sequence comprising at least 15 contiguous nucleotides, with 0, 1, 2, or 3 mismatches, of the corresponding portion of a non-coding strand of human MARC1 gene such that the sense strand is complementary to the at least 15 contiguous nucleotides in the antisense strand.
2. The dsRNA agent of embodiment 1, wherein the coding strand of the human MARC1 gene comprises the sequence of SEQ ID NO: 1.
3. The dsRNA agent of embodiment 1 or 2, wherein the non-coding strand of the MARC1 gene comprises the sequence of SEQ ID NO: 2.
4. The dsRNA agent of embodiment 1, wherein the coding strand of the human MARC1 gene comprises the sequence of SEQ ID NO: 4000.
5. The dsRNA agent of embodiment 1 or 4, wherein the non-coding strand of the human MARC1 gene comprises the sequence of SEQ ID NO: 4001.
6. The dsRNA agent of embodiment 1, wherein the coding strand of the human MARC1 gene comprises the sequence of any one of SEQ ID NO: 4003, SEQ ID NO: 4005, SEQ ID NO: 4007, or SEQ ID NO: 4009.
7. The dsRNA agent of embodiment 1, wherein the non-coding strand of the human MARC1 gene comprises the sequence of any one of SEQ ID NO: 4004, SEQ ID NO: 4006, SEQ ID NO: 4008, or SEQ ID NO: 4010.
8. A double stranded ribonucleic acid (dsRNA) agent for inhibiting expression of aMARC1 gene, wherein the dsRNA agent comprises a sense strand and an antisense strand forming a double stranded region, wherein the antisense strand comprises a nucleotide sequence comprising at least 15 contiguous nucleotides, with 0, 1, 2, or 3 mismatches, of a portion of nucleotide sequence of SEQ ID NO: 2 such that the sense strand is complementary to the at least 15 contiguous nucleotides in the antisense strand.
9. The dsRNA agent of embodiment 8, wherein the sense strand comprises a nucleotide sequence comprising at least 15 contiguous nucleotides, with 0, or 1, 2, or 3 mismatches, of the corresponding portion of the nucleotide sequence of SEQ ID NO: 1.
10. A double stranded ribonucleic acid (dsRNA) agent for inhibiting expression of aMARC1 gene, wherein the dsRNA agent comprises a sense strand and an antisense strand forming a double stranded region, wherein the antisense strand comprises a nucleotide sequence comprising at least 15 contiguous nucleotides, with 0, 1, 2, or 3 mismatches, of a portion of nucleotide sequence of SEQ ID NO: 4001 such that the sense strand is complementary to the at least 15 contiguous nucleotides in the antisense strand.
11. The dsRNA agent of embodiment 10, wherein the sense strand comprises a nucleotide sequence comprising at least 15 contiguous nucleotides, with 0, or 1, 2, or 3 mismatches, of the corresponding portion of the nucleotide sequence of SEQ ID NO: 4000.
12. The dsRNA of any of the preceding embodiments, wherein the dsRNA agent comprises a sense strand and an antisense strand, wherein the antisense strand comprises a nucleotide sequence comprising at least 17 contiguous nucleotides, with 0, 1, 2, or 3 mismatches, of a portion of nucleotide sequence of SEQ ID NO: 2 such that the sense strand is complementary to the at least 17 contiguous nucleotides in the antisense strand.
13. The dsRNA of embodiment 12, wherein the sense strand comprises a nucleotide sequence comprising at least 17 contiguous nucleotides, with 0, or 1, 2, or 3 mismatches, of the corresponding portion of the nucleotide sequence of SEQ ID NO: 1.
14. The dsRNA of any of the preceding embodiments, wherein the dsRNA agent comprises a sense strand and an antisense strand, wherein the antisense strand comprises a nucleotide sequence comprising at least 17 contiguous nucleotides, with 0, 1, 2, or 3 mismatches, of a portion of nucleotide sequence of SEQ ID NO: 4001 such that the sense strand is complementary to the at least 17 contiguous nucleotides in the antisense strand.
15. The dsRNA of embodiment 14, wherein the sense strand comprises a nucleotide sequence comprising at least 17 contiguous nucleotides, with 0, or 1, 2, or 3 mismatches, of the corresponding portion of the nucleotide sequence of SEQ ID NO: 4000.
16. The dsRNA of any of the preceding embodiments, wherein the dsRNA agent comprises a sense strand and an antisense strand, wherein the antisense strand comprises a nucleotide sequence comprising at least 19 contiguous nucleotides, with 0, 1, 2, or 3 mismatches, of a portion of nucleotide sequence of SEQ ID NO: 2 such that the sense strand is complementary to the at least 19 contiguous nucleotides in the antisense strand.
17. The dsRNA of embodiment 16, wherein the sense strand comprises a nucleotide sequence comprising at least 19 contiguous nucleotides, with 0, 1, 2, or 3 mismatches, of the corresponding portion of the nucleotide sequence of SEQ ID NO: 1.
18. The dsRNA of any of the preceding embodiments, wherein the dsRNA agent comprises a sense strand and an antisense strand, wherein the antisense strand comprises a nucleotide sequence comprising at least 19 contiguous nucleotides, with 0, 1, 2, or 3 mismatches, of a portion of nucleotide sequence of SEQ ID NO: 4001 such that the sense strand is complementary to the at least 19 contiguous nucleotides in the antisense strand.
19. The dsRNA of embodiment 18, wherein the sense strand comprises a nucleotide sequence comprising at least 19 contiguous nucleotides, with 0, 1, 2, or 3 mismatches, of the corresponding portion of the nucleotide sequence of SEQ ID NO: 4000.
20. The dsRNA of any of the preceding embodiments, wherein the dsRNA agent comprises a sense strand and an antisense strand, wherein the antisense strand comprises a nucleotide sequence comprising at least 21 contiguous nucleotides, with 0, 1, 2, or 3 mismatches, of a portion of nucleotide sequence of SEQ ID NO: 2 such that the sense strand is complementary to the at least 21 contiguous nucleotides in the antisense strand.
21. The dsRNA of embodiment 20, wherein the sense strand comprises a nucleotide sequence comprising at least 21 contiguous nucleotides, with 0, or 1, 2, or 3 mismatches, of the corresponding portion of the nucleotide sequence of SEQ ID NO: 1.
22. The dsRNA of any of the preceding embodiments, wherein the dsRNA agent comprises a sense strand and an antisense strand, wherein the antisense strand comprises a nucleotide sequence comprising at least 21 contiguous nucleotides, with 0, 1, 2, or 3 mismatches, of a portion of nucleotide sequence of SEQ ID NO: 4001 such that the sense strand is complementary to the at least 21 contiguous nucleotides in the antisense strand.
23. The dsRNA of embodiment 22, wherein the sense strand comprises a nucleotide sequence comprising at least 21 contiguous nucleotides, with 0, or 1, 2, or 3 mismatches, of the corresponding portion of the nucleotide sequence of SEQ ID NO: 4000.
24. The dsRNA agent of any one of the preceding embodiments, wherein the portion of the sense strand is a portion within a sense strand in any one of Tables 2A, 2B, 3A, 3B, 4A, or 4B.
25. The dsRNA agent of any of the preceding embodiments, wherein the antisense strand comprises a nucleotide sequence comprising at least 15 contiguous nucleotides, with 0, 1, 2, or 3 mismatches, from one of the antisense sequences listed in Table 2A, 2B, 3A, 3B, 4A, or 4B.
26. The dsRNA agent of any of the preceding embodiments, wherein the sense strand comprises a nucleotide sequence comprising at least 15 contiguous nucleotides, with 0, 1, 2, or 3 mismatches, from a sense sequence listed in Table 2A, 2B, 3A, 3B, 4A, or 5B that corresponds to the antisense sequence.
27. The dsRNA agent of any of the preceding embodiments, wherein the antisense strand comprises a nucleotide sequence comprising at least 17 contiguous nucleotides, with 0, 1, 2, or 3 mismatches, from one of the antisense sequences listed in Table 2A, 2B, 3A, 3B, 4A, or 4B.
28. The dsRNA agent of any of the preceding embodiments, wherein the sense strand comprises a nucleotide sequence comprising at least 17 contiguous nucleotides, with 0, 1, 2, or 3 mismatches, from a sense sequence listed in Table 2A, 2B, 3A, 3B, 4A, or 4B that corresponds to the antisense sequence.
29. The dsRNA agent of any of the preceding embodiments, wherein the antisense strand comprises a nucleotide sequence comprising at least 19 contiguous nucleotides, with 0, 1, 2, or 3 mismatches, from one of the antisense sequences listed in Table 2A, 2B, 3A, 3B, 4A, or 4B.
30. The dsRNA agent of any of the preceding embodiments, wherein the sense strand comprises a nucleotide sequence comprising at least 19 contiguous nucleotides, with 0, 1, 2, or 3 mismatches, from a sense sequence listed in Table 2A, 2B, 3A, 3B, 4A, or 4B that corresponds to the antisense sequence.
31. The dsRNA agent of any of the preceding embodiments, wherein the antisense strand comprises a nucleotide sequence comprising at least 21 contiguous nucleotides, with 0, 1, 2, or 3 mismatches, from one of the antisense sequences listed in Table 2A, 2B, 3A, 3B, 4A, or 4B.
32. The dsRNA agent of any of the preceding embodiments, wherein the sense strand comprises a nucleotide sequence comprising at least 21 contiguous nucleotides, with 0, 1, 2, or 3 mismatches, from a sense sequence listed in Table 2A, 2B, 3A, 3B, 4A, or 4B that corresponds to the antisense sequence.
33. The dsRNA agent of any of the preceding embodiments, wherein the sense strand is at least 23 nucleotides in length, e.g., 23-30 nucleotides in length.
34. The dsRNA agent of any of the preceding embodiments, wherein the dsRNA agent comprises at least one modified nucleotide.
35. The dsRNA agent of embodiment 34, wherein no more than five of the sense strand nucleotides and not more than five of the nucleotides of the antisense strand are unmodified nucleotides.
36. The dsRNA agent of embodiment 34, wherein all of the nucleotides of the sense strand and all of the nucleotides of the antisense strand comprise a modification.
37. The dsRNA agent of any one of embodiments 34-36, wherein at least one of the modified nucleotides is selected from the group consisting of a deoxy-nucleotide, a 3′-terminal deoxy-thymine (dT) nucleotide, a 2′-O-methyl modified nucleotide, a 2′-fluoro modified nucleotide, a 2′-deoxy-modified nucleotide, a locked nucleotide, an unlocked nucleotide, a conformationally restricted nucleotide, a constrained ethyl nucleotide, an abasic nucleotide, a 2′-amino-modified nucleotide, a 2′-O-allyl-modified nucleotide, 2′-C-alkyl-modified nucleotide, a 2′-methoxyethyl modified nucleotide, a 2′-O-alkyl-modified nucleotide, a morpholino nucleotide, a phosphoramidate, a non-natural base comprising nucleotide, a tetrahydropyran modified nucleotide, a 1,5-anhydrohexitol modified nucleotide, a cyclohexenyl modified nucleotide, a nucleotide comprising a phosphorothioate group, a nucleotide comprising a methylphosphonate group, a nucleotide comprising a 5′-phosphate, a nucleotide comprising a 5′-phosphate mimic, a glycol modified nucleotide, and a 2-O—(N-methylacetamide) modified nucleotide; and combinations thereof.
38. The dsRNA agent of any of embodiments 34-36, wherein no more than five of the sense strand nucleotides and not more than five of the nucleotides of the antisense strand include modifications other than 2′-O-methyl modified nucleotide, a 2′-fluoro modified nucleotide, a 2′-deoxy-modified nucleotide, unlocked nucleic acids (UNA) or glycerol nucleic acid (GNA).
39. The dsRNA agent of any of the preceding embodiments, which comprises a non-nucleotide spacer (wherein optionally the non-nucleotide spacer comprises a C3-C6 alkyl) between two of the contiguous nucleotides of the sense strand or between two of the contiguous nucleotides of the antisense strand.
40. The dsRNA agent of any of the preceding embodiments, further comprising a ligand.
41. The dsRNA agent of embodiment 40, wherein the ligand is conjugated to the sense strand.
42. The dsRNA agent of embodiment 40 or 41, wherein the ligand is conjugated to the 3′ end or the 5′ end of the sense strand.
43. The dsRNA agent of embodiment 40 or 41, wherein the dsRNA agent is conjugated to the 3′ end of the sense strand.
44. The dsRNA agent of any one of embodiments 40-43, wherein the ligand comprises N-acetylgalactosamine (GalNAc).
45. The dsRNA agent of any one of embodiments 40-43, wherein the ligand is an N-acetylgalactosamine (GalNAc) derivative.
46. The dsRNA agent of embodiment 45, wherein the ligand is one or more GalNAc derivatives attached through a monovalent linker, or a bivalent, trivalent, or tetravalent branched linker.
47. The dsRNA agent of embodiment 45, wherein the ligand is

[chemical structure]

48. The dsRNA agent of embodiment 47, wherein the dsRNA agent is conjugated to the ligand as shown in the following schematic

[chemical structure]

[0601] wherein X is O or S.

49. The dsRNA agent of embodiment 47, wherein the X is O.
50. The dsRNA agent of any one of embodiments 1-49, further comprising a terminal, chiral modification occurring at the first internucleotide linkage at the 3′ end of the antisense strand, having the linkage phosphorus atom in Sp configuration,

[0602] a terminal, chiral modification occurring at the first internucleotide linkage at the 5′ end of the antisense strand, having the linkage phosphorus atom in Rp configuration, and

[0603] a terminal, chiral modification occurring at the first internucleotide linkage at the 5′ end of the sense strand, having the linkage phosphorus atom in either Rp configuration or Sp configuration.

51. The dsRNA agent of any one of embodiments 1-49, further comprising

[0604] a terminal, chiral modification occurring at the first and second internucleotide linkages at the 3′ end of the antisense strand, having the linkage phosphorus atom in Sp configuration,

[0605] a terminal, chiral modification occurring at the first internucleotide linkage at the 5′ end of the antisense strand, having the linkage phosphorus atom in Rp configuration, and

[0606] a terminal, chiral modification occurring at the first internucleotide linkage at the 5′ end of the sense strand, having the linkage phosphorus atom in either Rp or Sp configuration.

52. The dsRNA agent of any one of embodiments 1-49, further comprising

[0607] a terminal, chiral modification occurring at the first, second and third internucleotide linkages at the 3′ end of the antisense strand, having the linkage phosphorus atom in Sp configuration,

[0608] a terminal, chiral modification occurring at the first internucleotide linkage at the 5′ end of the antisense strand, having the linkage phosphorus atom in Rp configuration, and

[0609] a terminal, chiral modification occurring at the first internucleotide linkage at the 5′ end of the sense strand, having the linkage phosphorus atom in either Rp or Sp configuration.

53. The dsRNA agent of any one of embodiments 1-49, further comprising

[0610] a terminal, chiral modification occurring at the first, and second internucleotide linkages at the 3′ end of the antisense strand, having the linkage phosphorus atom in Sp configuration,

[0611] a terminal, chiral modification occurring at the third internucleotide linkages at the 3′ end of the antisense strand, having the linkage phosphorus atom in Rp configuration,

[0612] a terminal, chiral modification occurring at the first internucleotide linkage at the 5′ end of the antisense strand, having the linkage phosphorus atom in Rp configuration, and

[0613] a terminal, chiral modification occurring at the first internucleotide linkage at the 5′ end of the sense strand, having the linkage phosphorus atom in either Rp or Sp configuration.

54. The dsRNA agent of any one of embodiments 1-49, further comprising

[0614] a terminal, chiral modification occurring at the first, and second internucleotide linkages at the 3′ end of the antisense strand, having the linkage phosphorus atom in Sp configuration,

[0615] a terminal, chiral modification occurring at the first, and second internucleotide linkages at the 5′ end of the antisense strand, having the linkage phosphorus atom in Rp configuration, and

[0616] a terminal, chiral modification occurring at the first internucleotide linkage at the 5′ end of the sense strand, having the linkage phosphorus atom in either Rp or Sp configuration.

55. The dsRNA agent of any of the preceding embodiments, wherein each strand is no more than 30 nucleotides in length.
56. The dsRNA agent of any of the preceding embodiments, wherein at least one strand comprises a 3′ overhang of at least 1 nucleotide.
57. The dsRNA agent of any of the preceding embodiments, wherein at least one strand comprises a 3′ overhang of at least 2 nucleotides.
58. The dsRNA agent of any of the preceding embodiments, wherein at least one strand comprises a 3′ overhang of 2 nucleotides.
59. The dsRNA agent of any of the preceding embodiments, wherein the double stranded region is 15-30 nucleotide pairs in length.
60. The dsRNA agent of embodiment 59, wherein the double stranded region is 17-23 nucleotide pairs in length.
61. The dsRNA agent of embodiment 59, wherein the double stranded region is 17-25 nucleotide pairs in length.
62. The dsRNA agent of embodiment 59, wherein the double stranded region is 23-27 nucleotide pairs in length.
63. The dsRNA agent of embodiment 59, wherein the double stranded region is 19-21 nucleotide pairs in length.
64. The dsRNA agent of embodiment 59, wherein the double stranded region is 21-23 nucleotide pairs in length.
65. The dsRNA agent of any of the preceding embodiments, wherein each strand has 19-30 nucleotides.
66. The dsRNA agent of any of the preceding embodiments, wherein each strand has 19-23 nucleotides.
67. The dsRNA agent of any of the preceding embodiments, wherein each strand has 21-23 nucleotides.
68. The dsRNA agent of any of the preceding embodiments, wherein the agent comprises at least one phosphorothioate or methylphosphonate internucleotide linkage.
69. The dsRNA agent of embodiment 68, wherein the phosphorothioate or methylphosphonate internucleotide linkage is at the 3′-terminus of one strand.
70. The dsRNA agent of embodiment 69, wherein the strand is the antisense strand.
71. The dsRNA agent of embodiment 69, wherein the strand is the sense strand.
72. The dsRNA agent of embodiment 69, wherein the phosphorothioate or methylphosphonate internucleotide linkage is at the 5′-terminus of one strand.
73. The dsRNA agent of embodiment 72, wherein the strand is the antisense strand.
74. The dsRNA agent of embodiment 72, wherein the strand is the sense strand.
75. The dsRNA agent of embodiment 68, wherein each of the 5′- and 3′-terminus of one strand comprises a phosphorothioate or methylphosphonate internucleotide linkage.
76. The dsRNA agent of embodiment 75, wherein the strand is the antisense strand.
77. The dsRNA agent of any of the preceding embodiments, wherein the base pair at the 1 position of the 5′-end of the antisense strand of the duplex is an AU base pair.
78. The dsRNA agent of embodiment 75, wherein the sense strand has a total of 21 nucleotides and the antisense strand has a total of 23 nucleotides.
79. A cell containing the dsRNA agent of any one of embodiments 1-78.
80. A human cell comprising a reduced level of MARC1 mRNA or a level of MARC1 protein as compared to an otherwise similar untreated cell, wherein optionally the level is reduced by at least 10%, 15%, 20%, 25%, 30%, 35%, 40%, 45%, 50%, 55%, 60%, 65%, 70%, 75%, 80%, 85%, 90%, or 95%.
81. The human cell of embodiment 68, which was produced by a process comprising contacting a human cell with the dsRNA agent of any one of embodiments 1-78.
82. A pharmaceutical composition for inhibiting expression of a MARC1 gene, comprising the dsRNA agent of any one of embodiments 1-78.
83. A pharmaceutical composition comprising the dsRNA agent of any one of embodiments 1-78 and a lipid formulation.
84. A method of inhibiting expression of a MARC1 gene in a cell, the method comprising:

[0617] (a) contacting the cell with the dsRNA agent of any one of embodiments 1-78 or a pharmaceutical composition of embodiment 82 or 83; and

[0618] (b) maintaining the cell produced in step (a) for a time sufficient to obtain degradation of the mRNA transcript of the MARC1 gene, thereby inhibiting expression of the MARC1 gene in the cell.

85. A method of inhibiting expression of a MARC1 gene in a cell, the method comprising:

[0619] (a) contacting the cell with the dsRNA agent of any one of embodiments 1-78, or a pharmaceutical composition of embodiment 82 or 83; and

[0620] (b) maintaining the cell produced in step (a) for a time sufficient to reduce levels of MARC1 mRNA, MARC1 protein, or both of MARC1 mRNA and protein, thereby inhibiting expression of the MARC1 gene in the cell.

86. The method of embodiment 84 or 85, wherein the cell is within a subject.
87. The method of embodiment 86, wherein the subject is a human.
88. The method of any one of embodiments 84-87, wherein the level of MARC1 mRNA is inhibited by at least 50%.
89. The method of any one of embodiments 84-87, wherein the level of MARC1 protein is inhibited by at least 50%.
90. The method of embodiment 87-89, wherein inhibiting expression of MARC1 gene decreases an MARC1 protein level in a biological sample (e.g., a serum sample) from the subject by at least 30%, 40%, 50%, 60%, 70%, 80%, 90%, or 95%.
91. The method of any one of embodiments 87-90, wherein the subject has been diagnosed with a liver disease or disorder, e.g., hepatic fibrosis or a metabolic disorder.
92. The method of embodiment 91, wherein the liver disease or disorder is hepatic fibrosis.
93. The method of embodiment 91, wherein the liver disease or disorder is a metabolic disorder.
94. The method of embodiment 91 or 93, wherein the metabolic disorder is nonalcoholic fatty liver disease (NAFLD) or non-alcoholic steatohepatitis (NASH).
95. The method of embodiment 91 or 93, wherein the metabolic disorder is nonalcoholic fatty liver disease (NAFLD).
96. The method of embodiment 91 or 93, wherein the metabolic disorder is non-alcoholic steatohepatitis (NASH).
97. A method of reducing serum cholesterol levels (e.g., total cholesterol levels, or LDL cholesterol levels) in a subject, comprising administering to the subject a therapeutically effective amount of the dsRNA agent of any one of embodiments 1-78 or a pharmaceutical composition of embodiment 82 or 83, thereby reducing serum cholesterol levels.
98. A method of treating a subject having or diagnosed with having a MARC1-associated disorder comprising administering to the subject a therapeutically effective amount of the dsRNA agent of any one of embodiments 1-78 or a pharmaceutical composition of embodiment 82 or 83, thereby treating the disorder.
99. The method of embodiment 98, wherein the MARC1-associated disorder is a hepatic fibrosis.
100. The method of embodiment 99, wherein the hepatic fibrosis is caused by nonalcoholic fatty liver disease (NAFLD) or non-alcoholic steatohepatitis (NASH).
101. The method of embodiment 99, wherein the MARC1-associated disorder is a metabolic disorder, e.g., nonalcoholic fatty liver disease (NAFLD) or non-alcoholic steatohepatitis (NASH).
102. The method of embodiment 101, wherein the MARC1-associated disorder is nonalcoholic fatty liver disease (NAFLD).
103. The method of embodiment 101, wherein the MARC1-associated disorder is non-alcoholic steatohepatitis (NASH).
104. The method of embodiment 98, wherein the MARC-1 associated disorder is a metabolic disorder associated with elevated serum cholesterol levels, e.g., a cardiovascular disease (e.g., a coronary artery disease).
105. The method of any one of embodiments 98-104, wherein treating comprises amelioration of at least one sign or symptom of the disorder (e.g., wherein the disorder is hepatic fibrosis or a metabolic disorder (e.g., nonalcoholic fatty liver disease (NAFLD) or non-alcoholic steatohepatitis (NASH)).
106. The method of embodiment 105, wherein at least one sign or symptom of a metabolic disorder or hepatic fibrosis comprises a measure of one or more of liver function (e.g., levels of liver enzymes (e.g., alanine aminotransferase (ALT) and aspartate aminotransferase (AST)), levels of triglycerides in the blood, serum cholesterol levels (e.g., total cholesterol levels or LDL cholesterol levels), cirrhosis, serum bilirubin levels, serum albumin levels, or presence or level of MARC1 (e.g., MARC1 gene, MARC1 mRNA, or MARC1 protein)).
107. The method of any of embodiments 98-106, wherein treating comprises a reduction in serum cholesterol levels (e.g., total cholesterol levels, or LDL cholesterol levels) in the subject.
108. The method of any one of embodiments 98-103, where treating comprises prevention of progression of the disorder.
109. The method of any one of embodiments 98-108, wherein the treating comprises inhibiting or reducing the expression or activity of MARC1 in a cell, e.g. a hepatocyte.
110. The method of embodiment 109, wherein the treating results in at least a 30% mean reduction from baseline of MARC1 mRNA in the cell.
111. The method of embodiment 109, wherein the treating results in at least a 60% mean reduction from baseline of MARC1 mRNA in the cell.
112. The method of embodiment 109, wherein the treating results in at least a 90% mean reduction from baseline of MARC1 mRNA in the cell.
113. The method of any of embodiments 86-112, wherein the subject is human.
114. The method of any one of embodiments 87-113, wherein the dsRNA agent is administered at a dose of about 0.01 mg/kg to about 50 mg/kg.
115. The method of any one of embodiments 87-114, wherein the dsRNA agent is administered to the subject subcutaneously.
116. The method of any one of embodiments 87-115, wherein the dsRNA agent is administered to the subject intravenously.
117. The method of any one of embodiments 87-101, further comprising measuring level of MARC1 (e.g., MARC1 gene, MARC1 mRNA, or MARC1 protein) in the subject.
118. The method of embodiment 117, where measuring the level of MARC1 in the subject comprises measuring the level of MARC1 gene, MARC1 protein or MARC1 mRNA in a biological sample from the subject (e.g., a tissue, blood, or serum sample).
119. The method of any one of embodiments 87-118, further comprising performing a blood test, an imaging test, or a liver biopsy.
120. The method of any one of embodiments 117-119, wherein measuring level of MARC1 (e.g., MARC1 gene, MARC1 mRNA, or MARC1 protein) in the subject is performed prior to treatment with the dsRNA agent or the pharmaceutical composition.
121. The method of embodiment 120, wherein, upon determination that a subject has a level of MARC1 (e.g., MARC1 gene, MARC1 mRNA, or MARC1 protein) that is greater than a reference level, the dsRNA agent or the pharmaceutical composition is administered to the subject.
122. The method of any one of embodiments 117-121, wherein measuring level of MARC1 (e.g., MARC1 gene, MARC1 mRNA, or MARC1 protein) in the subject is performed after treatment with the dsRNA agent or the pharmaceutical composition.
123. The method of any one of embodiments 98-122, further comprising administering to the subject an additional agent suitable for treatment or prevention of MARC1-associated disorder.
124. The method of embodiment 123, wherein the additional agent comprises an altered diet, weight loss, reduction or discontinuance of the consumption of alcohol, increased exercise, surgical liver resection, vitamin E, pioglitazone, anti-viral agents (e.g., lamivudine, interferon-alpha, ribavirin, adefovir, or corticosteroids.

### EXAMPLES

### Example 1. MARC1 siRNA

[0621] Nucleic acid sequences provided herein are represented using standard nomenclature. See the abbreviations of Table 1.

TABLE 1
Abbreviations of nucleotide monomers used in nucleic acid sequence representation
It will be understood that these monomers, when present in an oligonucleotide, are mutually
linked by 5′-3′-phosphodiester bonds.

| Abbreviation | Nucleotide(s) |
|---|---|
| A | Adenosine-3′-phosphate |
| Ab | beta-L-adenosine-3′-phosphate |
| Abs | beta-L-adenosine-3′-phosphorothioate |
| Af | 2′-fluoroadenosine-3′-phosphate |
| Afs | 2′-fluoroadenosine-3′-phosphorothioate |
| (Ahd) | 2′-O-hexadecyl-adenosine-3′-phosphate |
| (Ahds) | 2′-O-hexadecyl-adenosine-3′-phosphorothioate |
| As | adenosine-3′-phosphorothioate |
| C | cytidine-3′-phosphate |
| Cb | beta-L-cytidine-3′-phosphate |
| Cbs | beta-L-cytidine-3′-phosphorothioate |
| Cf | 2′-fluorocytidine-3′-phosphate |
| Cfs | 2′-fluorocytidine-3′-phosphorothioate |
| (Chd) | 2′-O-hexadecyl-cytidine-3′-phosphate |
| (Chds) | 2′-O-hexadecyl-cytidine-3′-phosphorothioate |
| Cs | cytidine-3′-phosphorothioate |
| G | guanosine-3’-phosphate |
| Gb | beta-L-guanosine-3′-phosphate |
| Gbs | beta-L-guanosine-3′-phosphorothioate |
| Gf | 2′-fluoroguanosine-3′-phosphate |
| Gfs | 2′-fluoroguanosine-3′-phosphorothioate |
| (Ghd) | 2′-O-hexadecyl-guanosine-3′-phosphate |
| (Ghds) | 2′-O-hexadecyl-guanosine-3′-phosphorothioate |
| Gs | guanosine-3′-phosphorothioate |
| T | 5′-methyluridine-3′-phosphate |
| Tb | beta-L-thymidine-3′-phosphate |
| Tbs | beta-L-thymidine-3′-phosphorothioate |
| Tf | 2′-fluoro-5-methyluridine-3′-phosphate |
| Tfs | 2′-fluoro-5-methyluridine-3′-phosphorothioate |
| Tgn | thymidine-glycol nucleic acid (GNA) S-Isomer |
| Agn | adenosine- glycol nucleic acid (GNA) S-Isomer |
| Cgn | cytidine-glycol nucleic acid (GNA) S-Isomer |
| Ggn | guanosine-glycol nucleic acid (GNA) S-Isomer |
| Ts | 5-methyluridine-3′-phosphorothioate |
| U | Uridine-3′-phosphate |
| Ub | beta-L-uridine-3′-phosphate |
| Ubs | beta-L-uridine-3′-phosphorothioate |
| Uf | 2′-fluorouridine-3′-phosphate |
| Ufs | 2′-fluorouridine-3′-phosphorothioate |
| (Uhd) | 2′-O-hexadecyl-uridine-3′-phosphate |
| (Uhds) | 2′-O-hexadecyl-uridine-3′-phosphorothioate |
| Us | uridine-3′-phosphorothioate |
| N | any nucleotide (G, A, C, T or U) |
| VP | Vinyl phosphonate |
| a | 2′-O-methyladenosine-3′-phosphate |
| as | 2′-O-methyladenosine-3′-phosphorothioate |
| c | 2′-O-methylcytidine-3′-phosphate |
| cs | 2′-O-methylcytidine-3′-phosphorothioate |
| g | 2′-O-methylguanosine-3′-phosphate |
| gs | 2′-O-methylguanosine-3′-phosphorothioate |
| t | 2′-O-methyl-5-methyluridine-3′-phosphate |
| ts | 2′-O-methyl-5-methyluridine-3′-phosphorothioate |
| u | 2′-O-methyluridine-3′-phosphate |
| us | 2′-O-methyluridine-3′-phosphorothioate |
| dA | 2′-deoxyadenosine-3′-phosphate |
| dAs | 2′-deoxyadenosine-3′-phosphorothioate |
| dC | 2′-deoxycytidine-3′-phosphate |
| dCs | 2′-deoxycytidine-3′-phosphorothioate |
| dG | 2′-deoxyguanosine-3′-phosphate |
| dGs | 2′-deoxyguanosine-3′-phosphorothioate |
| dT | 2′-deoxythymidine |
| dTs | 2′-deoxythymidine-3′-phosphorothioate |
| dU | 2′-deoxyuridine |
| s | phosphorothioate linkage |
| L96¹ | N-[tris(GalNAc-alkyl)-amidodecanoyl)]-4-hydroxyprolinol |
| | Hyp-(GalNAc-alkyl)3 |
| (Aeo) | 2′-O-methoxyethyladenosine-3′-phosphate |
| (Aeos) | 2′-O-methoxyethyladenosine-3′-phosphorothioate |
| (Geo) | 2′-O-methoxyethylguanosine-3′-phosphate |
| (Geos) | 2′-O-methoxyethylguanosine-3′-phosphorothioate |
| (Teo) | 2′-O-methoxyethyl-5-methyluridine-3′-phosphate |
| (Teos) | 2′-O-methoxyethyl-5-methyluridine-3′-phosphorothioate |
| (m5Ceo) | 2′-O-methoxyethyl-5-methylcytidine-3′-phosphate |
| (m5Ceos) | 2′-O-methoxyethyl-5-methylcytidine-3′-phosphorothioate |

¹The chemical structure of L96 is as follows:

[chemical structure]

### Experimental Methods

### Bioinformatics

[0622] Transcripts

[0623] A set of siRNAs were generated that target a human and mouse MARC1, “Mitochondrial amidoxime reducing component 1” (human: NCBI refseqID NM_022746.4, NCBI GeneID: 64757; human: NCBI refseqID XM_011509900.3, NCBI geneID: 64757; or mouse: NCBI refseq ID NM_001290273.1; NCBI) were generated. The human NM_022746.4 REFSEQ mRNA, has a length of 7287 bases. The human XM_011509900.3 REFSEQ mRNA has a length of 2294 base pairs. The mouse NM_001290273.1 REFSEQ mRNA has a length of 2148 bases. Pairs of oligos were generated using bioinformatic methods and ranked. Exemplary pairs of oligos targeting the human MARC1 are shown in Table 2A and Table 2B and Tables 3A and 3B. Modified sequences are presented in Table 2A and 3A. Unmodified sequences are presented in Table 2B and 3B. Exemplary pairs of oligos targeting the mouse MARC1 are shown in Tables 4A and Table 4B. Modified sequences are presented in Table 4A. Unmodified sequences are presented in Table 4B. The target mRNA source for each exemplary set of duplexes is in Tables 2A, 2B, 3A, 3B, 4A, and 4B are denoted in the tables. The number following the decimal point in the duplex name as indicated in the tables merely refers to a batch production number.

TABLE 2A
Exemplary Human MARC1 siRNA Modified Single Strands and Duplex Sequences

| | | | | | Seq ID | | | Seq ID |
|---|---|---|---|---|---|---|---|---|
| | Sense | Seq ID | | Antisense | NO: | Antisense | mRNA target | NO: |
| Duplex | sequence | NO: | Sense sequence | sequence | (anti- | sequence | sequence in | (mRNA |
| Name | name | (sense) | (5′-3′) | name | sense) | (5′-3′) | NM_022746.4 | target) |
| AD- | A- | 3 | CCUUCAGAACGAAA | A- | 355 | AUAACUUUCGUUCU | CCUUCAGAACGAAAG | 707 |
| 890263. | 1690346. | | GUUAUdTdT | 1690347.1 | | GAAGGdTdT | UUAU | |
| 1 | 1 | | | | | | | |
| AD- | A- | 4 | GAACGAAAGUUAUA | A- | 356 | UUCCAUAUAACUUU | GAACGAAAGUUAUAU | 708 |
| 890268. | 1690356. | | UGGAAdTdT | 1690357.1 | | CGUUCdTdT | GGAA | |
| 1 | 1 | | | | | | | |
| AD- | A- | 5 | GUUUAAAACCCAAU | A- | 357 | UAGAUAUUGGGUUU | GUUUAAAACCCAAUA | 709 |
| 890427. | 1690674. | | AUCUAdTdT | 1690675.1 | | UAAACdTdT | UCUA | |
| 1 | 1 | | | | | | | |
| AD- | A- | 6 | UAUGUCCUGGAAU | A- | 358 | UCUAAUAUUCCAGG | UAUGUCCUGGAAUAU | 710 |
| 890301. | 1690422. | | AUUAGAdTdT | 1690423.1 | | ACAUAdTdT | UAGA | |
| 1 | 1 | | | | | | | |
| AD- | A- | 7 | GUAUGUCCUGGAA | A- | 359 | CUAAUAUUCCAGGA | GUAUGUCCUGGAAUA | 711 |
| 890300. | 1690420. | | UAUUAGdTdT | 1690421.1 | | CAUACdTdT | UUAG | |
| 1 | 1 | | | | | | | |
| AD- | A- | 8 | ACCCUUCAGAACGA | A- | 360 | AACUUUCGUUCUGA | ACCCUUCAGAACGAA | 712 |
| 890262. | 1690344. | | AAGUUdTdT | 1690345.1 | | AGGGUdTdT | AGUU | |
| 1 | 1 | | | | | | | |
| AD- | A- | 9 | GCCCAAUAUUGUAA | A- | 361 | UGAAAUUACAAUAU | GCCCAAUAUUGUAAU | 713 |
| 890186. | 1690192. | | UUUCAdTdT | 1690193.1 | | UGGGCdTdT | UUCA | |
| 1 | 1 | | | | | | | |
| AD- | A- | 10 | GGACCAUCAAAGUG | A- | 362 | UCUCCCACUUUGAU | GGACCAUCAAAGUGG | 714 |
| 890294. | 1690408. | | GGAGAdTdT | 1690409.1 | | GGUCCdTdT | GAGA | |
| 1 | 1 | | | | | | | |
| AD- | A- | 11 | AAUCACCACUCUUU | A- | 363 | UGCCCAAAGAGUGG | AAUCACCACUCUUUG | 715 |
| 890275. | 1690370. | | GGGCAdTdT | 1690371.1 | | UGAUUdTdT | GGCA | |
| 1 | 1 | | | | | | | |
| AD- | A- | 12 | CUCUUUGGGCAGU | A- | 364 | CAAAAUACUGCCCAA | CUCUUUGGGCAGUAU | 716 |
| 890279. | 1690378. | | AUUUUGdTdT | 1690379.1 | | AGAGdTdT | UUUG | |
| 1 | 1 | | | | | | | |
| AD- | A- | 13 | GAUGCGAUGUCUA | A- | 365 | UCUGCAUAGACAUC | GAUGCGAUGUCUAUG | 717 |
| 890202. | 1690224. | | UGCAGAdTdT | 1690225.1 | | GCAUCdTdT | CAGA | |
| 1 | 1 | | | | | | | |
| AD- | A- | 14 | GGAAAAUCACCACU | A- | 366 | CAAAGAGUGGUGAU | GGAAAAUCACCACUC | 718 |
| 890271. | 1690362. | | CUUUGdTdT | 1690363.1 | | UUUCCdTdT | UUUG | |
| 1 | 1 | | | | | | | |
| AD- | A- | 15 | AAUGUUCUCAAAAA | A- | 367 | UGUCAUUUUUGAGA | AAUGUUCUCAAAAAU | 719 |
| 890309. | 1690438. | | UGACAdTdT | 1690439.1 | | ACAUUdTdT | GACA | |
| 1 | 1 | | | | | | | |
| AD- | A- | 16 | GUUUUGGCUUGUG | A- | 368 | GUUGAUCACAAGCC | GUUUUGGCUUGUGA | 720 |
| 890114. | 1690048. | | AUCAACdTdT | 1690049.1 | | AAAACdTdT | UCAAC | |
| 1 | 1 | | | | | | | |
| AD- | A- | 17 | AGAAGAAAAGUGA | A- | 369 | ACUGAAUCACUUUU | AGAAGAAAAGUGAUU | 721 |
| 890411. | 1690642. | | UUCAGUdTdT | 1690643.1 | | CUUCUdTdT | CAGU | |
| 1 | 1 | | | | | | | |
| AD- | A- | 18 | UCUGAUGAAGUAU | A- | 370 | AAAAAUAUACUUCA | UCUGAUGAAGUAUAU | 722 |
| 890435. | 1690690. | | AUUUUUdTdT | 1690691.1 | | UCAGAdTdT | UUUU | |
| 1 | 1 | | | | | | | |
| AD- | A- | 19 | GGCCCAAUAUUGUA | A- | 371 | GAAAUUACAAUAUU | GGCCCAAUAUUGUAA | 723 |
| 890185. | 1690190. | | AUUUCdTdT | 1690191.1 | | GGGCCdTdT | UUUC | |
| 1 | 1 | | | | | | | |
| AD- | A- | 20 | GGAUGCGAUGUCU | A- | 372 | CUGCAUAGACAUCGC | GGAUGCGAUGUCUAU | 724 |
| 890201. | 1690222. | | AUGCAGdTdT | 1690223.1 | | AUCCdTdT | GCAG | |
| 1 | 1 | | | | | | | |
| AD- | A- | 21 | AAAAUGUUCUCAAA | A- | 373 | UCAUUUUUGAGAAC | AAAAUGUUCUCAAAA | 725 |
| 890307. | 1690434. | | AAUGAdTdT | 1690435.1 | | AUUUUdTdT | AUGA | |
| 1 | 1 | | | | | | | |
| AD- | A- | 22 | UGUAAUUUCAGGA | A- | 374 | AUCGCAUCCUGAAA | UGUAAUUUCAGGAUG | 726 |
| 890193. | 1690206. | | UGCGAUdTdT | 1690207.1 | | UUACAdTdT | CGAU | |
| 1 | 1 | | | | | | | |
| AD- | A- | 23 | AACUGAUUAUGGA | A- | 375 | AACUAUUCCAUAAUC | AACUGAUUAUGGAAU | 727 |
| 890341. | 1690502. | | AUAGUUdTdT | 1690503.1 | | AGUUdTdT | AGUU | |
| 1 | 1 | | | | | | | |
| AD- | A- | 24 | CACUUGAAGCAUGG | A- | 376 | AAACACCAUGCUUCA | CACUUGAAGCAUGGU | 728 |
| 890317. | 1690454. | | UGUUUdTdT | 1690455.1 | | AGUGdTdT | GUUU | |
| 1 | 1 | | | | | | | |
| AD- | A- | 25 | ACACUUGAAGCAUG | A- | 377 | AACACCAUGCUUCAA | ACACUUGAAGCAUGG | 729 |
| 890316. | 1690452. | | GUGUUdTdT | 1690453.1 | | GUGUdTdT | UGUU | |
| 1 | 1 | | | | | | | |
| AD- | A- | 26 | CAUUCCCCUCAGCU | A- | 378 | UCAUUAGCUGAGGG | CAUUCCCCUCAGCUAA | 730 |
| 890401. | 1690622. | | AAUGAdTdT | 1690623.1 | | GAAUGdTdT | UGA | |
| 1 | 1 | | | | | | | |
| AD- | A- | 27 | GAAACACUGAAGAG | A- | 379 | GAUAACUCUUCAGU | GAAACACUGAAGAGU | 731 |
| 890247. | 1690314. | | UUAUCdTdT | 1690315.1 | | GUUUCdTdT | UAUC | |
| 1 | 1 | | | | | | | |
| AD- | A- | 28 | GGACCAGAUUGCU | A- | 380 | UGAGUAAGCAAUCU | GGACCAGAUUGCUUA | 732 |
| 890161. | 1690142. | | UACUCAdTdT | 1690143.1 | | GGUCCdTdT | CUCA | |
| 1 | 1 | | | | | | | |
| AD- | A- | 29 | GCCAUUUUGUCCU | A- | 381 | AAUCAAAGGACAAAA | GCCAUUUUGUCCUUU | 733 |
| 890447. | 1690714. | | UUGAUUdTdT | 1690715.1 | | UGGCdTdT | GAUU | |
| 1 | 1 | | | | | | | |
| AD- | A- | 30 | ACUCUUUGGGCAG | A- | 382 | AAAAUACUGCCCAAA | ACUCUUUGGGCAGUA | 734 |
| 890278. | 1690376. | | UAUUUUdTdT | 1690377.1 | | GAGUdTdT | UUUU | |
| 1 | 1 | | | | | | | |
| AD- | A- | 31 | CUAAAGGUGCUCAG | A- | 383 | UCCUCCUGAGCACCU | CUAAAGGUGCUCAGG | 735 |
| 890396. | 1690612. | | GAGGAdTdT | 1690613.1 | | UUAGdTdT | AGGA | |
| 1 | 1 | | | | | | | |
| AD- | A- | 32 | GCCAGUGUGACCCU | A- | 384 | UCUGAAGGGUCACA | GCCAGUGUGACCCUU | 736 |
| 890257. | 1690334. | | UCAGAdTdT | 1690335.1 | | CUGGCdTdT | CAGA | |
| 1 | 1 | | | | | | | |
| AD- | A- | 33 | GAGAAGAAAAGUG | A- | 385 | CUGAAUCACUUUUC | GAGAAGAAAAGUGAU | 737 |
| 890410. | 1690640. | | AUUCAGdTdT | 1690641.1 | | UUCUCdTdT | UCAG | |
| 1 | 1 | | | | | | | |
| AD- | A- | 34 | CAACCAGGAGGGAA | A- | 386 | CAUGUUUCCCUCCU | CAACCAGGAGGGAAA | 738 |
| 890118. | 1690056. | | ACAUGdTdT | 1690057.1 | | GGUUGdTdT | CAUG | |
| 1 | 1 | | | | | | | |
| AD- | A- | 35 | AGAGAAGAAAGUU | A- | 387 | UGCUUUAACUUUCU | AGAGAAGAAAGUUAA | 739 |
| 890171. | 1690162. | | AAAGCAdTdT | 1690163.1 | | UCUCUdTdT | AGCA | |
| 1 | 1 | | | | | | | |
| AD- | A- | 36 | AGUGGGAGACCCUG | A- | 388 | GUACACAGGGUCUC | AGUGGGAGACCCUGU | 740 |
| 890296. | 1690412. | | UGUACdTdT | 1690413.1 | | CCACUdTdT | GUAC | |
| 1 | 1 | | | | | | | |
| AD- | A- | 37 | GCAUUGGAUUUCC | A- | 389 | CCUUUAGGAAAUCC | GCAUUGGAUUUCCUA | 741 |
| 890388. | 1690596. | | UAAAGGdTdT | 1690597.1 | | AAUGCdTdT | AAGG | |
| 1 | 1 | | | | | | | |
| AD- | A- | 38 | GGCUUGUUCCAGA | A- | 390 | AAUGCAUCUGGAAC | GGCUUGUUCCAGAUG | 742 |
| 890235. | 1690290. | | UGCAUUdTdT | 1690291.1 | | AAGCCdTdT | CAUU | |
| 1 | 1 | | | | | | | |
| AD- | A- | 39 | GGAUUUCCUAAAG | A- | 391 | GAGCACCUUUAGGA | GGAUUUCCUAAAGGU | 743 |
| 890393. | 1690606. | | GUGCUCdTdT | 1690607.1 | | AAUCCdTdT | GCUC | |
| 1 | 1 | | | | | | | |
| AD- | A- | 40 | GUGACCCUUCAGAA | A- | 392 | UUUCGUUCUGAAGG | GUGACCCUUCAGAAC | 744 |
| 890259. | 1690338. | | CGAAAdTdT | 1690339.1 | | GUCACdTdT | GAAA | |
| 1 | 1 | | | | | | | |
| AD- | A- | 41 | CAGACAGCAUUGGA | A- | 393 | GGAAAUCCAAUGCU | CAGACAGCAUUGGAU | 745 |
| 890385. | 1690590. | | UUUCCdTdT | 1690591.1 | | GUCUGdTdT | UUCC | |
| 1 | 1 | | | | | | | |
| AD- | A- | 42 | GCAUUUUAACCACA | A- | 394 | UCCACUGUGGUUAA | GCAUUUUAACCACAG | 746 |
| 890241. | 1690302. | | GUGGAdTdT | 1690303.1 | | AAUGCdTdT | UGGA | |
| 1 | 1 | | | | | | | |
| AD- | A- | 43 | GAGGAGAAGAAAAG | A- | 395 | AAUCACUUUUCUUC | GAGGAGAAGAAAAGU | 747 |
| 890408. | 1690636. | | UGAUUdTdT | 1690637.1 | | UCCUCdTdT | GAUU | |
| 1 | 1 | | | | | | | |
| AD- | A- | 44 | AAGUUAUAUGGAA | A- | 396 | GUGAUUUUCCAUAU | AAGUUAUAUGGAAAA | 748 |
| 890269. | 1690358. | | AAUCACdTdT | 1690359.1 | | AACUUdTdT | UCAC | |
| 1 | 1 | | | | | | | |
| AD- | A- | 45 | AGUUAUAUGGAAA | A- | 397 | GGUGAUUUUCCAUA | AGUUAUAUGGAAAAU | 749 |
| 890270. | 1690360. | | AUCACCdTdT | 1690361.1 | | UAACUdTdT | CACC | |
| 1 | 1 | | | | | | | |
| AD- | A- | 46 | UGUUUAAAACCCAA | A- | 398 | AGAUAUUGGGUUUU | UGUUUAAAACCCAAU | 750 |
| 890426. | 1690672. | | UAUCUdTdT | 1690673.1 | | AAACAdTdT | AUCU | |
| 1 | 1 | | | | | | | |
| AD- | A- | 47 | UCUUAUUGGUGAC | A- | 399 | UUCCACGUCACCAAU | UCUUAUUGGUGACGU | 751 |
| 890231. | 1690282. | | GUGGAAdTdT | 1690283.1 | | AAGAdTdT | GGAA | |
| 1 | 1 | | | | | | | |
| AD- | A- | 48 | GACCCUUCAGAACG | A- | 400 | ACUUUCGUUCUGAA | GACCCUUCAGAACGA | 752 |
| 890261. | 1690342. | | AAAGUdTdT | 1690343.1 | | GGGUCdTdT | AAGU | |
| 1 | 1 | | | | | | | |
| AD- | A- | 49 | CUCUAAGAUCUGAU | A- | 401 | ACUUCAUCAGAUCU | CUCUAAGAUCUGAUG | 753 |
| 890431. | 1690682. | | GAAGUdTdT | 1690683.1 | | UAGAGdTdT | AAGU | |
| 1 | 1 | | | | | | | |
| AD- | A- | 50 | UAAGAUCUGAUGA | A- | 402 | UAUACUUCAUCAGA | UAAGAUCUGAUGAAG | 754 |
| 890432. | 1690684. | | AGUAUAdTdT | 1690685.1 | | UCUUAdTdT | UAUA | |
| 1 | 1 | | | | | | | |
| AD- | A- | 51 | UCACCACUCUUUGG | A- | 403 | ACUGCCCAAAGAGUG | UCACCACUCUUUGGG | 755 |
| 890277. | 1690374. | | GCAGUdTdT | 1690375.1 | | GUGAdTdT | CAGU | |
| 1 | 1 | | | | | | | |
| AD- | A- | 52 | CCAAGGACCAGAUU | A- | 404 | UAAGCAAUCUGGUC | CCAAGGACCAGAUUG | 756 |
| 890159. | 1690138. | | GCUUAdTdT | 1690139.1 | | CUUGGdTdT | CUUA | |
| 1 | 1 | | | | | | | |
| AD- | A- | 53 | GUUCCAGAUGCAU | A- | 405 | GUUAAAAUGCAUCU | GUUCCAGAUGCAUUU | 757 |
| 890237. | 1690294. | | UUUAACdTdT | 1690295.1 | | GGAACdTdT | UAAC | |
| 1 | 1 | | | | | | | |
| AD- | A- | 54 | GACUAAACUUGAAA | A- | 406 | ACAUUUUUCAAGUU | GACUAAACUUGAAAA | 758 |
| 890453. | 1690726. | | AAUGUdTdT | 1690727.1 | | UAGUCdTdT | AUGU | |
| 1 | 1 | | | | | | | |
| AD- | A- | 55 | AGGAUGCGAUGUC | A- | 407 | UGCAUAGACAUCGC | AGGAUGCGAUGUCUA | 759 |
| 890200. | 1690220. | | UAUGCAdTdT | 1690221.1 | | AUCCUdTdT | UGCA | |
| 1 | 1 | | | | | | | |
| AD- | A- | 56 | CAUUGGAUUUCCU | A- | 408 | ACCUUUAGGAAAUC | CAUUGGAUUUCCUAA | 760 |
| 890389. | 1690598. | | AAAGGUdTdT | 1690599.1 | | CAAUGdTdT | AGGU | |
| 1 | 1 | | | | | | | |
| AD- | A- | 57 | GAUCUGAUGAAGU | A- | 409 | AAAUAUACUUCAUC | GAUCUGAUGAAGUAU | 761 |
| 890433. | 1690686. | | AUAUUUdTdT | 1690687.1 | | AGAUCdTdT | AUUU | |
| 1 | 1 | | | | | | | |
| AD- | A- | 58 | AAAUGGAAGCUACU | A- | 410 | GUCAAAGUAGCUUC | AAAUGGAAGCUACUU | 762 |
| 890466. | 1690752. | | UUGACdTdT | 1690753.1 | | CAUUUdTdT | UGAC | |
| 1 | 1 | | | | | | | |
| AD- | A- | 59 | ACUCUAAGAUCUGA | A- | 411 | CUUCAUCAGAUCUU | ACUCUAAGAUCUGAU | 763 |
| 890430. | 1690680. | | UGAAGdTdT | 1690681.1 | | AGAGUdTdT | GAAG | |
| 1 | 1 | | | | | | | |
| AD- | A- | 60 | GACCAGAUUGCUUA | A- | 412 | CUGAGUAAGCAAUC | GACCAGAUUGCUUAC | 764 |
| 890162. | 1690144. | | CUCAGdTdT | 1690145.1 | | UGGUCdTdT | UCAG | |
| 1 | 1 | | | | | | | |
| AD- | A- | 61 | GACCAUCAAAGUGG | A- | 413 | GUCUCCCACUUUGA | GACCAUCAAAGUGGG | 765 |
| 890295. | 1690410. | | GAGACdTdT | 1690411.1 | | UGGUCdTdT | AGAC | |
| 1 | 1 | | | | | | | |
| AD- | A- | 62 | GGGAAGUUGACUA | A- | 414 | CAAGUUUAGUCAAC | GGGAAGUUGACUAAA | 766 |
| 890450. | 1690720. | | AACUUGdTdT | 1690721.1 | | UUCCCdTdT | CUUG | |
| 1 | 1 | | | | | | | |
| AD- | A- | 63 | CUGAUUAUGGAAU | A- | 415 | AGAACUAUUCCAUA | CUGAUUAUGGAAUAG | 767 |
| 890343. | 1690506. | | AGUUCUdTdT | 1690507.1 | | AUCAGdTdT | UUCU | |
| 1 | 1 | | | | | | | |
| AD- | A- | 64 | AGGAGAAGAAAAG | A- | 416 | GAAUCACUUUUCUU | AGGAGAAGAAAAGUG | 768 |
| 890409. | 1690638. | | UGAUUCdTdT | 1690639.1 | | CUCCUdTdT | AUUC | |
| 1 | 1 | | | | | | | |
| AD- | A- | 65 | CCAUUUUGUCCUU | A- | 417 | UAAUCAAAGGACAAA | CCAUUUUGUCCUUUG | 769 |
| 890448. | 1690716. | | UGAUUAdTdT | 1690717.1 | | AUGGdTdT | AUUA | |
| 1 | 1 | | | | | | | |
| AD- | A- | 66 | AAAUGUUCUCAAAA | A- | 418 | GUCAUUUUUGAGAA | AAAUGUUCUCAAAAA | 770 |
| 890308. | 1690436. | | AUGACdTdT | 1690437.1 | | CAUUUdTdT | UGAC | |
| 1 | 1 | | | | | | | |
| AD- | A- | 67 | UGUUCCAGAUGCA | A- | 419 | UUAAAAUGCAUCUG | UGUUCCAGAUGCAUU | 771 |
| 890236. | 1690292. | | UUUUAAdTdT | 1690293.1 | | GAACAdTdT | UUAA | |
| 1 | 1 | | | | | | | |
| AD- | A- | 68 | CUGGGCCAGUAAUG | A- | 420 | GUUCCCAUUACUGG | CUGGGCCAGUAAUGG | 772 |
| 890298. | 1690416. | | GGAACdTdT | 1690417.1 | | CCCAGdTdT | GAAC | |
| 1 | 1 | | | | | | | |
| AD- | A- | 69 | ACCAGAUUGCUUAC | A- | 421 | UCUGAGUAAGCAAU | ACCAGAUUGCUUACU | 773 |
| 890163. | 1690146. | | UCAGAdTdT | 1690147.1 | | CUGGUdTdT | CAGA | |
| 1 | 1 | | | | | | | |
| AD- | A- | 70 | CGGGCUAGCUUUU | A- | 422 | CAUUUCAAAAGCUA | CGGGCUAGCUUUUGA | 774 |
| 890359. | 1690538. | | GAAAUGdTdT | 1690539.1 | | GCCCGdTdT | AAUG | |
| 1 | 1 | | | | | | | |
| AD- | A- | 71 | GCGAUGUCUAUGC | A- | 423 | ACCUCUGCAUAGACA | GCGAUGUCUAUGCAG | 775 |
| 890203. | 1690226. | | AGAGGUdTdT | 1690227.1 | | UCGCdTdT | AGGA | |
| 1 | 1 | | | | | | | |
| AD- | A- | 72 | CCCCGGGCUAGCUU | A- | 424 | UUCAAAAGCUAGCCC | CCCCGGGCUAGCUUU | 776 |
| 890356. | 1690532. | | UUGAAdTdT | 1690533.1 | | GGGGdTdT | UGAA | |
| 1 | 1 | | | | | | | |
| AD- | A- | 73 | GAAAAUCACCACUC | A- | 425 | CCAAAGAGUGGUGA | GAAAAUCACCACUCU | 777 |
| 890272. | 1690364. | | UUUGGdTdT | 1690365.1 | | UUUUCdTdT | UUGG | |
| 1 | 1 | | | | | | | |
| AD- | A- | 74 | CACUGAAGAGUUAU | A- | 426 | UGGCGAUAACUCUU | CACUGAAGAGUUAUC | 778 |
| 890251. | 1690322. | | CGCCAdTdT | 1690323.1 | | CAGUGdTdT | GCCA | |
| 1 | 1 | | | | | | | |
| AD- | A- | 75 | AUCUGAUGAAGUA | A- | 427 | AAAAUAUACUUCAU | AUCUGAUGAAGUAUA | 779 |
| 890434. | 1690688. | | UAUUUUdTdT | 1690689.1 | | CAGAUdTdT | UUUU | |
| 1 | 1 | | | | | | | |
| AD- | A- | 76 | UUCAGGAUGCGAU | A- | 428 | AUAGACAUCGCAUCC | UUCAGGAUGCGAUGU | 780 |
| 890197. | 1690214. | | GUCUAUdTdT | 1690215.1 | | UGAAdTdT | CUAU | |
| 1 | 1 | | | | | | | |
| AD- | A- | 77 | GCCUGGUCCUGAU | A- | 429 | AGGGAAAUCAGGAC | GCCUGGUCCUGAUUU | 781 |
| 890126. | 1690072. | | UUCCCUdTdT | 1690073.1 | | CAGGCdTdT | CCCU | |
| 1 | 1 | | | | | | | |
| AD- | A- | 78 | AACACUUGAAGCAU | A- | 430 | ACACCAUGCUUCAAG | AACACUUGAAGCAUG | 782 |
| 890315. | 1690450. | | GGUGUdTdT | 1690451.1 | | UGUUdTdT | GUGU | |
| 1 | 1 | | | | | | | |
| AD- | A- | 79 | UGGGAAGUUGACU | A- | 431 | AAGUUUAGUCAACU | UGGGAAGUUGACUAA | 783 |
| 890449. | 1690718. | | AAACUUdTdT | 1690719.1 | | UCCCAdTdT | ACUU | |
| 1 | 1 | | | | | | | |
| AD- | A- | 80 | GUAAUUUCAGGAU | A- | 432 | CAUCGCAUCCUGAAA | GUAAUUUCAGGAUGC | 784 |
| 890194. | 1690208. | | GCGAUGdTdT | 1690209.1 | | UUACdTdT | GAUG | |
| 1 | 1 | | | | | | | |
| AD- | A- | 81 | GGAAGUUGACUAA | A- | 433 | UCAAGUUUAGUCAA | GGAAGUUGACUAAAC | 785 |
| 890451. | 1690722. | | ACUUGAdTdT | 1690723.1 | | CUUCCdTdT | UUGA | |
| 1 | 1 | | | | | | | |
| AD- | A- | 82 | CAACACUUGAAGCA | A- | 434 | CACCAUGCUUCAAGU | CAACACUUGAAGCAU | 786 |
| 890314. | 1690448. | | UGGUGdTdT | 1690449.1 | | GUUGdTdT | GGUG | |
| 1 | 1 | | | | | | | |
| AD- | A- | 83 | CUAAACUUGAAAAA | A- | 435 | AAACAUUUUUCAAG | CUAAACUUGAAAAAU | 787 |
| 890455. | 1690730. | | UGUUUdTdT | 1690731.1 | | UUUAGdTdT | GUUU | |
| 1 | 1 | | | | | | | |
| AD- | A- | 84 | CUUCGAGCCUCACA | A- | 436 | UCGCAUGUGAGGCU | CUUCGAGCCUCACAU | 788 |
| 890147. | 1690114. | | UGCGAdTdT | 1690115.1 | | CGAAGdTdT | GCGA | |
| 1 | 1 | | | | | | | |
| AD- | A- | 85 | CUGGAAACACUGAA | A- | 437 | AACUCUUCAGUGUU | CUGGAAACACUGAAG | 789 |
| 890246. | 1690312. | | GAGUUdTdT | 1690313.1 | | UCCAGdTdT | AGUU | |
| 1 | 1 | | | | | | | |
| AD- | A- | 86 | GAAGAAAAGUGAU | A- | 438 | CACUGAAUCACUUU | GAAGAAAAGUGAUUC | 790 |
| 890412. | 1690644. | | UCAGUGdTdT | 1690645.1 | | UCUUCdTdT | AGUG | |
| 1 | 1 | | | | | | | |
| AD- | A- | 87 | GUCUCAAUGCUUCA | A- | 439 | GACAUUGAAGCAUU | GUCUCAAUGCUUCAA | 791 |
| 890332. | 1690484. | | AUGUCdTdT | 1690485.1 | | GAGACdTdT | UGUC | |
| 1 | 1 | | | | | | | |
| AD- | A- | 88 | CUUCUCAGACAGCA | A- | 440 | UCCAAUGCUGUCUG | CUUCUCAGACAGCAU | 792 |
| 890380. | 1690580. | | UUGGAdTdT | 1690581.1 | | AGAAGdTdT | UGGA | |
| 1 | 1 | | | | | | | |
| AD- | A- | 89 | GAUCCUUGCCAUUC | A- | 441 | GAGGGGAAUGGCAA | GAUCCUUGCCAUUCC | 793 |
| 890400. | 1690620. | | CCCUCdTdT | 1690621.1 | | GGAUCdTdT | CCUC | |
| 1 | 1 | | | | | | | |
| AD- | A- | 90 | UUUAAAACCCAAUA | A- | 442 | AUAGAUAUUGGGUU | UUUAAAACCCAAUAU | 794 |
| 890428. | 1690676. | | UCUAUdTdT | 1690677.1 | | UUAAAdTdT | CUAU | |
| 1 | 1 | | | | | | | |
| AD- | A- | 91 | UGGUGUUUCAGAA | A- | 443 | UCUCAGUUCUGAAA | UGGUGUUUCAGAACU | 795 |
| 890322. | 1690464. | | CUGAGAdTdT | 1690465.1 | | CACCAdTdT | GAGA | |
| 1 | 1 | | | | | | | |
| AD- | A- | 92 | AGUGAUUCAGUGA | A- | 444 | CUGAAAUCACUGAA | AGUGAUUCAGUGAUU | 796 |
| 890415. | 1690650. | | UUUCAGdTdT | 1690651.1 | | UCACUdTdT | UCAG | |
| 1 | 1 | | | | | | | |
| AD- | A- | 93 | AGACAGCAUUGGAU | A- | 445 | AGGAAAUCCAAUGC | AGACAGCAUUGGAUU | 797 |
| 890386. | 1690592. | | UUCCUdTdT | 1690593.1 | | UGUCUdTdT | UCCU | |
| 1 | 1 | | | | | | | |
| AD- | A- | 94 | CAUUUUAACCACAG | A- | 446 | GUCCACUGUGGUUA | CAUUUUAACCACAGU | 798 |
| 890242. | 1690304. | | UGGACdTdT | 1690305.1 | | AAAUGdTdT | GGAC | |
| 1 | 1 | | | | | | | |
| AD- | A- | 95 | UUCAGAACGAAAGU | A- | 447 | AUAUAACUUUCGUU | UUCAGAACGAAAGUU | 799 |
| 890264. | 1690348. | | UAUAUdTdT | 1690349.1 | | CUGAAdTdT | AUAU | |
| 1 | 1 | | | | | | | |
| AD- | A- | 96 | GGAAUAGUUCUUU | A- | 448 | CAGGAGAAAGAACU | GGAAUAGUUCUUUCU | 800 |
| 890351. | 1690522. | | CUCCUGdTdT | 1690523.1 | | AUUCCdTdT | CCUG | |
| 1 | 1 | | | | | | | |
| AD- | A- | 97 | AGUUAAAGCAACCA | A- | 449 | GAAGUUGGUUGCUU | AGUUAAAGCAACCAA | 801 |
| 890172. | 1690164. | | ACUUCdTdT | 1690165.1 | | UAACUdTdT | CUUC | |
| 1 | 1 | | | | | | | |
| AD- | A- | 98 | AUUCCCCUCAGCUA | A- | 450 | GUCAUUAGCUGAGG | AUUCCCCUCAGCUAA | 802 |
| 890402. | 1690624. | | AUGACdTdT | 1690625.1 | | GGAAUdTdT | UGAC | |
| 1 | 1 | | | | | | | |
| AD- | A- | 99 | CUAGAGAAGAAAGU | A- | 451 | CUUUAACUUUCUUC | CUAGAGAAGAAAGUU | 803 |
| 890169. | 1690158. | | UAAAGdTdT | 1690159.1 | | UCUAGdTdT | AAAG | |
| 1 | 1 | | | | | | | |
| AD- | A- | 100 | CUGAUGAAGUAUA | A- | 452 | AAAAAAUAUACUUC | CUGAUGAAGUAUAUU | 804 |
| 890436. | 1690692. | | UUUUUUdTdT | 1690693.1 | | AUCAGdTdT | UUUU | |
| 1 | 1 | | | | | | | |
| AD- | A- | 101 | UUGUGAUUUUCAC | A- | 453 | AAAAAUGUGAAAAU | UUGUGAUUUUCACAU | 805 |
| 890327. | 1690474. | | AUUUUUdTdT | 1690475.1 | | CACAAdTdT | UUUU | |
| 1 | 1 | | | | | | | |
| AD- | A- | 102 | GAGUUAUCGCCAG | A- | 454 | GUCACACUGGCGAU | GAGUUAUCGCCAGUG | 806 |
| 890255. | 1690330. | | UGUGACdTdT | 1690331.1 | | AACUCdTdT | UGAC | |
| 1 | 1 | | | | | | | |
| AD- | A- | 103 | GACAACACUUGAAG | A- | 455 | CCAUGCUUCAAGUG | GACAACACUUGAAGC | 807 |
| 890313. | 1690446. | | CAUGGdTdT | 1690447.1 | | UUGUCdTdT | AUGG | |
| 1 | 1 | | | | | | | |
| AD- | A- | 104 | CUCAGACAGCAUUG | A- | 456 | AAAUCCAAUGCUGU | CUCAGACAGCAUUGG | 808 |
| 890383. | 1690586. | | GAUUUdTdT | 1690587.1 | | CUGAGdTdT | AUUU | |
| 1 | 1 | | | | | | | |
| AD- | A- | 105 | CUUUAAAGGGGGA | A- | 457 | UCCUUUUCCCCCUU | CUUUAAAGGGGGAAA | 809 |
| 890421. | 1690662. | | AAAGGAdTdT | 1690663.1 | | UAAAGdTdT | AGGA | |
| 1 | 1 | | | | | | | |
| AD- | A- | 106 | CCAUAGAUCUGGAU | A- | 458 | GCCAGAUCCAGAUCU | CCAUAGAUCUGGAUC | 810 |
| 890377. | 1690574. | | CUGGCdTdT | 1690575.1 | | AUGGdTdT | UGGC | |
| 1 | 1 | | | | | | | |
| AD- | A- | 107 | UGACAAGACAGGAU | A- | 459 | UCAGAAUCCUGUCU | UGACAAGACAGGAUU | 811 |
| 890336. | 1690492. | | UCUGAdTdT | 1690493.1 | | UGUCAdTdT | CUGA | |
| 1 | 1 | | | | | | | |
| AD- | A- | 108 | GUGUCUCAAUGCU | A- | 460 | CAUUGAAGCAUUGA | GUGUCUCAAUGCUUC | 812 |
| 890330. | 1690480. | | UCAAUGdTdT | 1690481.1 | | GACACdTdT | AAUG | |
| 1 | 1 | | | | | | | |
| AD- | A- | 109 | UGAUUAUGGAAUA | A- | 461 | AAGAACUAUUCCAU | UGAUUAUGGAAUAG | 813 |
| 890344. | 1690508. | | GUUCUUdTdT | 1690509.1 | | AAUCAdTdT | UUCUU | |
| 1 | 1 | | | | | | | |
| AD- | A- | 110 | AUGUCCUGGAAUA | A- | 462 | AUCUAAUAUUCCAG | AUGUCCUGGAAUAUU | 814 |
| 890302. | 1690424. | | UUAGAUdTdT | 1690425.1 | | GACAUdTdT | AGAU | |
| 1 | 1 | | | | | | | |
| AD- | A- | 111 | CCAGAUGCAUUUUA | A- | 463 | GUGGUUAAAAUGCA | CCAGAUGCAUUUUAA | 815 |
| 890240. | 1690300. | | ACCACdTdT | 1690301.1 | | UCUGGdTdT | CCAC | |
| 1 | 1 | | | | | | | |
| AD- | A- | 112 | UGGAGGAGAAGAA | A- | 464 | UCACUUUUCUUCUC | UGGAGGAGAAGAAAA | 816 |
| 890406. | 1690632. | | AAGUGAdTdT | 1690633.1 | | CUCCAdTdT | GUGA | |
| 1 | 1 | | | | | | | |
| AD- | A- | 113 | UGGAUUUCCUAAA | A- | 465 | AGCACCUUUAGGAA | UGGAUUUCCUAAAGG | 817 |
| 890392. | 1690604. | | GGUGCUdTdT | 1690605.1 | | AUCCAdTdT | UGCU | |
| 1 | 1 | | | | | | | |
| AD- | A- | 114 | AGAACGAAAGUUAU | A- | 466 | UCCAUAUAACUUUC | AGAACGAAAGUUAUA | 818 |
| 890267. | 1690354. | | AUGGAdTdT | 1690355.1 | | GUUCUdTdT | UGGA | |
| 1 | 1 | | | | | | | |
| AD- | A- | 115 | GGGCUAGCUUUUG | A- | 467 | CCAUUUCAAAAGCUA | GGGCUAGCUUUUGAA | 819 |
| 890360. | 1690540. | | AAAUGGdTdT | 1690541.1 | | GCCCdTdT | AUGG | |
| 1 | 1 | | | | | | | |
| AD- | A- | 116 | CAGGCCCAAUAUUG | A- | 468 | AAUUACAAUAUUGG | CAGGCCCAAUAUUGU | 820 |
| 890183. | 1690186. | | UAAUUdTdT | 1690187.1 | | GCCUGdTdT | AAUU | |
| 1 | 1 | | | | | | | |
| AD- | A- | 117 | AGUAUAUUUUUUA | A- | 469 | UGGCAAUAAAAAAU | AGUAUAUUUUUUAU | 821 |
| 890439. | 1690698. | | UUGCCAdTdT | 1690699.1 | | AUACUdTdT | UGCCA | |
| 1 | 1 | | | | | | | |
| AD- | A- | 118 | GUGGAGGAGAAGA | A- | 470 | CACUUUUCUUCUCC | GUGGAGGAGAAGAAA | 822 |
| 890405. | 1690630. | | AAAGUGdTdT | 1690631.1 | | UCCACdTdT | AGUG | |
| 1 | 1 | | | | | | | |
| AD- | A- | 119 | GACAGGAUUCUGAA | A- | 471 | GAGUUUUCAGAAUC | GACAGGAUUCUGAAA | 823 |
| 890337. | 1690494. | | AACUCdTdT | 1690495.1 | | CUGUCdTdT | ACUC | |
| 1 | 1 | | | | | | | |
| AD- | A- | 120 | UAAAUGGAAGCUAC | A- | 472 | UCAAAGUAGCUUCC | UAAAUGGAAGCUACU | 824 |
| 890465. | 1690750. | | UUUGAdTdT | 1690751.1 | | AUUUAdTdT | UUGA | |
| 1 | 1 | | | | | | | |
| AD- | A- | 121 | GCUUCUUAUUGGU | A- | 473 | CACGUCACCAAUAAG | GCUUCUUAUUGGUGA | 825 |
| 890228. | 1690276. | | GACGUGdTdT | 1690277.1 | | AAGCdTdT | CGUG | |
| 1 | 1 | | | | | | | |
| AD- | A- | 122 | ACUGAUUAUGGAA | A- | 474 | GAACUAUUCCAUAA | ACUGAUUAUGGAAUA | 826 |
| 890342. | 1690504. | | UAGUUCdTdT | 1690505.1 | | UCAGUdTdT | GUUC | |
| 1 | 1 | | | | | | | |
| AD- | A- | 123 | GGCUAGCUUUUGA | A- | 475 | GCCAUUUCAAAAGC | GGCUAGCUUUUGAAA | 827 |
| 890361. | 1690542. | | AAUGGCdTdT | 1690543.1 | | UAGCCdTdT | UGGC | |
| 1 | 1 | | | | | | | |
| AD- | A- | 124 | AAAACUGUGAAUAA | A- | 476 | UCCAUUUAUUCACA | AAAACUGUGAAUAAA | 828 |
| 890460. | 1690740. | | AUGGAdTdT | 1690741.1 | | GUUUUdTdT | UGGA | |
| 1 | 1 | | | | | | | |
| AD- | A- | 125 | GCUAGCUUUUGAA | A- | 477 | UGCCAUUUCAAAAG | GCUAGCUUUUGAAAU | 829 |
| 890362. | 1690544. | | AUGGCAdTdT | 1690545.1 | | CUAGCdTdT | GGCA | |
| 1 | 1 | | | | | | | |
| AD- | A- | 126 | AGAAAAGUGAUUCA | A- | 478 | AUCACUGAAUCACU | AGAAAAGUGAUUCAG | 830 |
| 890413. | 1690646. | | GUGAUdTdT | 1690647.1 | | UUUCUdTdT | UGAU | |
| 1 | 1 | | | | | | | |
| AD- | A- | 127 | GACAGCAUUGGAU | A- | 479 | UAGGAAAUCCAAUG | GACAGCAUUGGAUUU | 831 |
| 890387. | 1690594. | | UUCCUAdTdT | 1690595.1 | | CUGUCdTdT | CCUA | |
| 1 | 1 | | | | | | | |
| AD- | A- | 128 | ACUAAACUUGAAAA | A- | 480 | AACAUUUUUCAAGU | ACUAAACUUGAAAAA | 832 |
| 890454. | 1690728. | | AUGUUdTdT | 1690729.1 | | UUAGUdTdT | UGUU | |
| 1 | 1 | | | | | | | |
| AD- | A- | 129 | AAUGCUUCAAUGUC | A- | 481 | ACUGGGACAUUGAA | AAUGCUUCAAUGUCC | 833 |
| 890335. | 1690490. | | CCAGUdTdT | 1690491.1 | | GCAUUdTdT | CAGU | |
| 1 | 1 | | | | | | | |
| AD- | A- | 130 | GUGCAGCCUACACA | A- | 482 | UCCUUUGUGUAGGC | GUGCAGCCUACACAA | 834 |
| 890134. | 1690088. | | AAGGAdTdT | 1690089.1 | | UGCACdTdT | AGGA | |
| 1 | 1 | | | | | | | |
| AD- | A- | 131 | CCGGGCUAGCUUU | A- | 483 | AUUUCAAAAGCUAG | CCGGGCUAGCUUUUG | 835 |
| 890358. | 1690536. | | UGAAAUdTdT | 1690537.1 | | CCCGGdTdT | AAAU | |
| 1 | 1 | | | | | | | |
| AD- | A- | 132 | AAUGGAAGCUACUU | A- | 484 | AGUCAAAGUAGCUU | AAUGGAAGCUACUUU | 836 |
| 890467. | 1690754. | | UGACUdTdT | 1690755.1 | | CCAUUdTdT | GACU | |
| 1 | 1 | | | | | | | |
| AD- | A- | 133 | GGAUCCUUGCCAUU | A- | 485 | AGGGGAAUGGCAAG | GGAUCCUUGCCAUUC | 837 |
| 890399. | 1690618. | | CCCCUdTdT | 1690619.1 | | GAUCCdTdT | CCCU | |
| 1 | 1 | | | | | | | |
| AD- | A- | 134 | AAUUUUCCAUAGA | A- | 486 | UCCAGAUCUAUGGA | AAUUUUCCAUAGAUC | 838 |
| 890372. | 1690564. | | UCUGGAdTdT | 1690565.1 | | AAAUUdTdT | UGGA | |
| 1 | 1 | | | | | | | |
| AD- | A- | 135 | UGGAUAACCAGCUU | A- | 487 | UCAGGAAGCUGGUU | UGGAUAACCAGCUUC | 839 |
| 890142. | 1690104. | | CCUGAdTdT | 1690105.1 | | AUCCAdTdT | CUGA | |
| 1 | 1 | | | | | | | |
| AD- | A- | 136 | GGGCAGUAUUUUG | A- | 488 | CCAGCACAAAAUACU | GGGCAGUAUUUUGU | 840 |
| 890285. | 1690390. | | UGCUGGdTdT | 1690391.1 | | GCCCdTdT | GCUGG | |
| 1 | 1 | | | | | | | |
| AD- | A- | 137 | AAACUGUGAAUAAA | A- | 489 | UUCCAUUUAUUCAC | AAACUGUGAAUAAAU | 841 |
| 890461. | 1690742. | | UGGAAdTdT | 1690743.1 | | AGUUUdTdT | GGAA | |
| 1 | 1 | | | | | | | |
| AD- | A- | 138 | CAGGAGGGAAACAU | A- | 490 | UAACCAUGUUUCCC | CAGGAGGGAAACAUG | 842 |
| 890121. | 1690062. | | GGUUAdTdT | 1690063.1 | | UCCUGdTdT | GUUA | |
| 1 | 1 | | | | | | | |
| AD- | A- | 139 | GUCCUGGAAUAUU | A- | 491 | GCAUCUAAUAUUCC | GUCCUGGAAUAUUAG | 843 |
| 890304. | 1690428. | | AGAUGCdTdT | 1690429.1 | | AGGACdTdT | AUGC | |
| 1 | 1 | | | | | | | |
| AD- | A- | 140 | UCUCAGACAGCAUU | A- | 492 | AAUCCAAUGCUGUC | UCUCAGACAGCAUUG | 844 |
| 890382. | 1690584. | | GGAUUdTdT | 1690585.1 | | UGAGAdTdT | GAUU | |
| 1 | 1 | | | | | | | |
| AD- | A- | 141 | GACUGAGGUGACCU | A- | 493 | CCUGAAGGUCACCUC | GACUGAGGUGACCUU | 845 |
| 890363. | 1690546. | | UCAGGdTdT | 1690547.1 | | AGUCdTdT | CAGG | |
| 1 | 1 | | | | | | | |
| AD- | A- | 142 | GAUUAUGGAAUAG | A- | 494 | AAAGAACUAUUCCA | GAUUAUGGAAUAGU | 846 |
| 890345. | 1690510. | | UUCUUUdTdT | 1690511.1 | | UAAUCdTdT | UCUUU | |
| 1 | 1 | | | | | | | |
| AD- | A- | 143 | GGAGGAGAAGAAAA | A- | 495 | AUCACUUUUCUUCU | GGAGGAGAAGAAAAG | 847 |
| 890407. | 1690634. | | GUGAUdTdT | 1690635.1 | | CCUCCdTdT | UGAU | |
| 1 | 1 | | | | | | | |
| AD- | A- | 144 | CCUAAAGGUGCUCA | A- | 496 | CCUCCUGAGCACCUU | CCUAAAGGUGCUCAG | 848 |
| 890395. | 1690610. | | GGAGGdTdT | 1690611.1 | | UAGGdTdT | GAGG | |
| 1 | 1 | | | | | | | |
| AD- | A- | 145 | AUAACUCUAAGAUC | A- | 497 | CAUCAGAUCUUAGA | AUAACUCUAAGAUCU | 849 |
| 890429. | 1690678. | | UGAUGdTdT | 1690679.1 | | GUUAUdTdT | GAUG | |
| 1 | 1 | | | | | | | |
| AD- | A- | 146 | AUAAAUGGAAGCUA | A- | 498 | CAAAGUAGCUUCCA | AUAAAUGGAAGCUAC | 850 |
| 890464. | 1690748. | | CUUUGdTdT | 1690749.1 | | UUUAUdTdT | UUUG | |
| 1 | 1 | | | | | | | |
| AD- | A- | 147 | UGUCUCAAUGCUUC | A- | 499 | ACAUUGAAGCAUUG | UGUCUCAAUGCUUCA | 851 |
| 890331. | 1690482. | | AAUGUdTdT | 1690483.1 | | AGACAdTdT | AUGU | |
| 1 | 1 | | | | | | | |
| AD- | A- | 148 | UGGCUUGUGAUCA | A- | 500 | CCUGGUUGAUCACA | UGGCUUGUGAUCAAC | 852 |
| 890115. | 1690050. | | ACCAGGdTdT | 1690051.1 | | AGCCAdTdT | CAGG | |
| 1 | 1 | | | | | | | |
| AD- | A- | 149 | ACAGGAUUCUGAAA | A- | 501 | GGAGUUUUCAGAAU | ACAGGAUUCUGAAAA | 853 |
| 890338. | 1690496. | | ACUCCdTdT | 1690497.1 | | CCUGUdTdT | CUCC | |
| 1 | 1 | | | | | | | |
| AD- | A- | 150 | UUCUCAGACAGCAU | A- | 502 | AUCCAAUGCUGUCU | UUCUCAGACAGCAUU | 854 |
| 890381. | 1690582. | | UGGAUdTdT | 1690583.1 | | GAGAAdTdT | GGAU | |
| 1 | 1 | | | | | | | |
| AD- | A- | 151 | CAUAGAUCUGGAUC | A- | 503 | GGCCAGAUCCAGAUC | CAUAGAUCUGGAUCU | 855 |
| 890378. | 1690576. | | UGGCCdTdT | 1690577.1 | | UAUGdTdT | GGCC | |
| 1 | 1 | | | | | | | |
| AD- | A- | 152 | AGUGUGACCCUUCA | A- | 504 | CGUUCUGAAGGGUC | AGUGUGACCCUUCAG | 856 |
| 890258. | 1690336. | | GAACGdTdT | 1690337.1 | | ACACUdTdT | AACG | |
| 1 | 1 | | | | | | | |
| AD- | A- | 153 | GUGAUUUUCACAU | A- | 505 | CGAAAAAUGUGAAA | GUGAUUUUCACAUUU | 857 |
| 890329. | 1690478. | | UUUUCGdTdT | 1690479.1 | | AUCACdTdT | UUCG | |
| 1 | 1 | | | | | | | |
| AD- | A- | 154 | CUGAAGAGUUAUC | A- | 506 | ACUGGCGAUAACUC | CUGAAGAGUUAUCGC | 858 |
| 890253. | 1690326. | | GCCAGUdTdT | 1690327.1 | | UUCAGdTdT | CAGU | |
| 1 | 1 | | | | | | | |
| AD- | A- | 155 | CCCCUGGAUCCUUG | A- | 507 | AAUGGCAAGGAUCC | CCCCUGGAUCCUUGC | 859 |
| 890397. | 1690614. | | CCAUUdTdT | 1690615.1 | | AGGGGdTdT | CAUU | |
| 1 | 1 | | | | | | | |
| AD- | A- | 156 | GACCCAAGGACCAG | A- | 508 | GCAAUCUGGUCCUU | GACCCAAGGACCAGA | 860 |
| 890156. | 1690132. | | AUUGCdTdT | 1690133.1 | | GGGUCdTdT | UUGC | |
| 1 | 1 | | | | | | | |
| AD- | A- | 157 | AACGCCCACCACAAA | A- | 509 | UGCAUUUGUGGUGG | AACGCCCACCACAAAU | 861 |
| 890137. | 1690094. | | UGCAdTdT | 1690095.1 | | GCGUUdTdT | GCA | |
| 1 | 1 | | | | | | | |
| AD- | A- | 158 | UUGUAAUUUCAGG | A- | 510 | UCGCAUCCUGAAAU | UUGUAAUUUCAGGAU | 862 |
| 890192. | 1690204. | | AUGCGAdTdT | 1690205.1 | | UACAAdTdT | GCGA | |
| 1 | 1 | | | | | | | |
| AD- | A- | 159 | GUGCUCCUUCUCCA | A- | 511 | GGAACUGGAGAAGG | GUGCUCCUUCUCCAG | 863 |
| 890404. | 1690628. | | GUUCCdTdT | 1690629.1 | | AGCACdTdT | UUCC | |
| 1 | 1 | | | | | | | |
| AD- | A- | 160 | CCCAAGGACCAGAU | A- | 512 | AAGCAAUCUGGUCC | CCCAAGGACCAGAUU | 864 |
| 890158. | 1690136. | | UGCUUdTdT | 1690137.1 | | UUGGGdTdT | GCUU | |
| 1 | 1 | | | | | | | |
| AD- | A- | 161 | AAAAUGACAACACU | A- | 513 | CUUCAAGUGUUGUC | AAAAUGACAACACUU | 865 |
| 890310. | 1690440. | | UGAAGdTdT | 1690441.1 | | AUUUUdTdT | GAAG | |
| 1 | 1 | | | | | | | |
| AD- | A- | 162 | GCUUCUCAGACAGC | A- | 514 | CCAAUGCUGUCUGA | GCUUCUCAGACAGCA | 866 |
| 890379. | 1690578. | | AUUGGdTdT | 1690579.1 | | GAAGCdTdT | UUGG | |
| 1 | 1 | | | | | | | |
| AD- | A- | 163 | AGCUUCCUGAAGUC | A- | 515 | GCUGUGACUUCAGG | AGCUUCCUGAAGUCA | 867 |
| 890145. | 1690110. | | ACAGCdTdT | 1690111.1 | | AAGCUdTdT | CAGC | |
| 1 | 1 | | | | | | | |
| AD- | A- | 164 | AACUGUGAAUAAAU | A- | 516 | CUUCCAUUUAUUCA | AACUGUGAAUAAAUG | 868 |
| 890462. | 1690744. | | GGAAGdTdT | 1690745.1 | | CAGUUdTdT | GAAG | |
| 1 | 1 | | | | | | | |
| AD- | A- | 165 | AGUUAUCGCCAGU | A- | 517 | GGUCACACUGGCGA | AGUUAUCGCCAGUGU | 869 |
| 890256. | 1690332. | | GUGACCdTdT | 1690333.1 | | UAACUdTdT | GACC | |
| 1 | 1 | | | | | | | |
| AD- | A- | 166 | CCAAUAUUGUAAU | A- | 518 | CCUGAAAUUACAAU | CCAAUAUUGUAAUUU | 870 |
| 890188. | 1690196. | | UUCAGGdTdT | 1690197.1 | | AUUGGdTdT | CAGG | |
| 1 | 1 | | | | | | | |
| AD- | A- | 167 | UUAUUGCCAUUUU | A- | 519 | AAGGACAAAAUGGC | UUAUUGCCAUUUUG | 871 |
| 890445. | 1690710. | | GUCCUUdTdT | 1690711.1 | | AAUAAdTdT | UCCUU | |
| 1 | 1 | | | | | | | |
| AD- | A- | 168 | CAAAUAGCAGACUU | A- | 520 | GGAACAAGUCUGCU | CAAAUAGCAGACUUG | 872 |
| 890149. | 1690118. | | GUUCCdTdT | 1690119.1 | | AUUUGdTdT | UUCC | |
| 1 | 1 | | | | | | | |
| AD- | A- | 169 | UCCUUUCUGAGGC | A- | 521 | AGCGACGCCUCAGAA | UCCUUUCUGAGGCGU | 873 |
| 890168. | 1690156. | | GUCGCUdTdT | 1690157.1 | | AGGAdTdT | CGCU | |
| 1 | 1 | | | | | | | |
| AD- | A- | 170 | UCCAUAGAUCUGGA | A- | 522 | CCAGAUCCAGAUCUA | UCCAUAGAUCUGGAU | 874 |
| 890376. | 1690572. | | UCUGGdTdT | 1690573.1 | | UGGAdTdT | CUGG | |
| 1 | 1 | | | | | | | |
| AD- | A- | 171 | CAGGGACCAUCAAA | A- | 523 | CCCACUUUGAUGGU | CAGGGACCAUCAAAG | 875 |
| 890291. | 1690402. | | GUGGGdTdT | 1690403.1 | | CCCUGdTdT | UGGG | |
| 1 | 1 | | | | | | | |
| AD- | A- | 172 | CCAGGGACCAUCAA | A- | 524 | CCACUUUGAUGGUC | CCAGGGACCAUCAAA | 876 |
| 890290. | 1690400. | | AGUGGdTdT | 1690401.1 | | CCUGGdTdT | GUGG | |
| 1 | 1 | | | | | | | |
| AD- | A- | 173 | AGAAAGAGGAAGAG | A- | 525 | ACCCACUCUUCCUCU | AGAAAGAGGAAGAGU | 877 |
| 890353. | 1690526. | | UGGGUdTdT | 1690527.1 | | UUCUdTdT | GGGU | |
| 1 | 1 | | | | | | | |
| AD- | A- | 174 | GCUGGAAACACUGA | A- | 526 | ACUCUUCAGUGUUU | GCUGGAAACACUGAA | 878 |
| 890245. | 1690310. | | AGAGUdTdT | 1690311.1 | | CCAGCdTdT | GAGU | |
| 1 | 1 | | | | | | | |
| AD- | A- | 175 | AUGGAAGCUACUU | A- | 527 | UAGUCAAAGUAGCU | AUGGAAGCUACUUUG | 879 |
| 890468. | 1690756. | | UGACUAdTdT | 1690757.1 | | UCCAUdTdT | ACUA | |
| 1 | 1 | | | | | | | |
| AD- | A- | 176 | AUUUUCCAUAGAUC | A- | 528 | AUCCAGAUCUAUGG | AUUUUCCAUAGAUCU | 880 |
| 890373. | 1690566. | | UGGAUdTdT | 1690567.1 | | AAAAUdTdT | GGAU | |
| 1 | 1 | | | | | | | |
| AD- | A- | 177 | AUAGCAGACUUGU | A- | 529 | GUCGGAACAAGUCU | AUAGCAGACUUGUUC | 881 |
| 890152. | 1690124. | | UCCGACdTdT | 1690125.1 | | GCUAUdTdT | CGAC | |
| 1 | 1 | | | | | | | |
| AD- | A- | 178 | CUCGCCUGGUCCUG | A- | 530 | GAAAUCAGGACCAG | CUCGCCUGGUCCUGA | 882 |
| 890124. | 1690068. | | AUUUCdTdT | 1690069.1 | | GCGAGdTdT | UUUC | |
| 1 | 1 | | | | | | | |
| AD- | A- | 179 | ACUGAAGAGUUAUC | A- | 531 | CUGGCGAUAACUCU | ACUGAAGAGUUAUCG | 883 |
| 890252. | 1690324. | | GCCAGdTdT | 1690325.1 | | UCAGUdTdT | CCAG | |
| 1 | 1 | | | | | | | |
| AD- | A- | 180 | GAAAACCUUUAAAG | A- | 532 | UCCCCCUUUAAAGG | GAAAACCUUUAAAGG | 884 |
| 890420. | 1690660. | | GGGGAdTdT | 1690661.1 | | UUUUCdTdT | GGGA | |
| 1 | 1 | | | | | | | |
| AD- | A- | 181 | CAGGAUGCGAUGUC | A- | 533 | GCAUAGACAUCGCA | CAGGAUGCGAUGUCU | 885 |
| 890199. | 1690218. | | UAUGCdTdT | 1690219.1 | | UCCUGdTdT | AUGC | |
| 1 | 1 | | | | | | | |
| AD- | A- | 182 | AAAGUGAUUCAGU | A- | 534 | GAAAUCACUGAAUC | AAAGUGAUUCAGUGA | 886 |
| 890414. | 1690648. | | GAUUUCdTdT | 1690649.1 | | ACUUUdTdT | UUUC | |
| 1 | 1 | | | | | | | |
| AD- | A- | 183 | ACUGUGAAUAAAU | A- | 535 | GCUUCCAUUUAUUC | ACUGUGAAUAAAUGG | 887 |
| 890463. | 1690746. | | GGAAGCdTdT | 1690747.1 | | ACAGUdTdT | AAGC | |
| 1 | 1 | | | | | | | |
| AD- | A- | 184 | CUUGUGAUCAACCA | A- | 536 | CCUCCUGGUUGAUC | CUUGUGAUCAACCAG | 888 |
| 890116. | 1690052. | | GGAGGdTdT | 1690053.1 | | ACAAGdTdT | GAGG | |
| 1 | 1 | | | | | | | |
| AD- | A- | 185 | ACUUGAAGCAUGG | A- | 537 | GAAACACCAUGCUUC | ACUUGAAGCAUGGUG | 889 |
| 890318. | 1690456. | | UGUUUCdTdT | 1690457.1 | | AAGUdTdT | UUUC | |
| 1 | 1 | | | | | | | |
| AD- | A- | 186 | ACUUCAGGCCCAAU | A- | 538 | ACAAUAUUGGGCCU | ACUUCAGGCCCAAUA | 890 |
| 890179. | 1690178. | | AUUGUdTdT | 1690179.1 | | GAAGUdTdT | UUGU | |
| 1 | 1 | | | | | | | |
| AD- | A- | 187 | GUGGAUAACCAGCU | A- | 539 | CAGGAAGCUGGUUA | GUGGAUAACCAGCUU | 891 |
| 890141. | 1690102. | | UCCUGdTdT | 1690103.1 | | UCCACdTdT | CCUG | |
| 1 | 1 | | | | | | | |
| AD- | A- | 188 | GAGGUGACCUUCAG | A- | 540 | GCUUCCUGAAGGUC | GAGGUGACCUUCAGG | 892 |
| 890366. | 1690552. | | GAAGCdTdT | 1690553.1 | | ACCUCdTdT | AAGC | |
| 1 | 1 | | | | | | | |
| AD- | A- | 189 | AAUGUUUUUAAAA | A- | 541 | UCACAGUUUUAAAA | AAUGUUUUUAAAACU | 893 |
| 890457. | 1690734. | | CUGUGAdTdT | 1690735.1 | | ACAUUdTdT | GUGA | |
| 1 | 1 | | | | | | | |
| AD- | A- | 190 | UAAUUUCAGGAUG | A- | 542 | ACAUCGCAUCCUGAA | UAAUUUCAGGAUGCG | 894 |
| 890195. | 1690210. | | CGAUGUdTdT | 1690211.1 | | AUUAdTdT | AUGU | |
| 1 | 1 | | | | | | | |
| AD- | A- | 191 | UAAAUUUGUGAUU | A- | 543 | UGUGAAAAUCACAA | UAAAUUUGUGAUUU | 895 |
| 890326. | 1690472. | | UUCACAdTdT | 1690473.1 | | AUUUAdTdT | UCACA | |
| 1 | 1 | | | | | | | |
| AD- | A- | 192 | GUUUAACUGAUUA | A- | 544 | AUUCCAUAAUCAGU | GUUUAACUGAUUAUG | 896 |
| 890339. | 1690498. | | UGGAAUdTdT | 1690499.1 | | UAAACdTdT | GAAU | |
| 1 | 1 | | | | | | | |
| AD- | A- | 193 | GAUCCUUUCUGAG | A- | 545 | CGACGCCUCAGAAAG | GAUCCUUUCUGAGGC | 897 |
| 890166. | 1690152. | | GCGUCGdTdT | 1690153.1 | | GAUCdTdT | GUCG | |
| 1 | 1 | | | | | | | |
| AD- | A- | 194 | UCUUUGGGCAGUA | A- | 546 | ACAAAAUACUGCCCA | UCUUUGGGCAGUAUU | 898 |
| 890280. | 1690380. | | UUUUGUdTdT | 1690381.1 | | AAGAdTdT | UUGU | |
| 1 | 1 | | | | | | | |
| AD- | A- | 195 | UGACCCUUCAGAAC | A- | 547 | CUUUCGUUCUGAAG | UGACCCUUCAGAACG | 899 |
| 890260. | 1690340. | | GAAAGdTdT | 1690341.1 | | GGUCAdTdT | AAAG | |
| 1 | 1 | | | | | | | |
| AD- | A- | 196 | UAUUGCCAUUUUG | A- | 548 | AAAGGACAAAAUGG | UAUUGCCAUUUUGUC | 900 |
| 890446. | 1690712. | | UCCUUUdTdT | 1690713.1 | | CAAUAdTdT | CUUU | |
| 1 | 1 | | | | | | | |
| AD- | A- | 197 | UUGUGCUGGAAAA | A- | 549 | CCUGGGUUUUCCAG | UUGUGCUGGAAAACC | 901 |
| 890287. | 1690394. | | CCCAGGdTdT | 1690395.1 | | CACAAdTdT | CAGG | |
| 1 | 1 | | | | | | | |
| AD- | A- | 198 | UAACUGAUUAUGG | A- | 550 | ACUAUUCCAUAAUCA | UAACUGAUUAUGGAA | 902 |
| 890340. | 1690500. | | AAUAGUdTdT | 1690501.1 | | GUUAdTdT | UAGU | |
| 1 | 1 | | | | | | | |
| AD- | A- | 199 | GAAUAGUUCUUUC | A- | 551 | GCAGGAGAAAGAAC | GAAUAGUUCUUUCUC | 903 |
| 890352. | 1690524. | | UCCUGCdTdT | 1690525.1 | | UAUUCdTdT | CUGC | |
| 1 | 1 | | | | | | | |
| AD- | A- | 200 | GGAGGGAAACAUG | A- | 552 | AGUAACCAUGUUUC | GGAGGGAAACAUGGU | 904 |
| 890123. | 1690066. | | GUUACUdTdT | 1690067.1 | | CCUCCdTdT | UACU | |
| 1 | 1 | | | | | | | |
| AD- | A- | 201 | CCCGGGCUAGCUUU | A- | 553 | UUUCAAAAGCUAGC | CCCGGGCUAGCUUUU | 905 |
| 890357. | 1690534. | | UGAAAdTdT | 1690535.1 | | CCGGGdTdT | GAAA | |
| 1 | 1 | | | | | | | |
| AD- | A- | 202 | UGGAAUAGUUCUU | A- | 554 | AGGAGAAAGAACUA | UGGAAUAGUUCUUUC | 906 |
| 890350. | 1690520. | | UCUCCUdTdT | 1690521.1 | | UUCCAdTdT | UCCU | |
| 1 | 1 | | | | | | | |
| AD- | A- | 203 | AUUGGAUUUCCUA | A- | 555 | CACCUUUAGGAAAU | AUUGGAUUUCCUAAA | 907 |
| 890390. | 1690600. | | AAGGUGdTdT | 1690601.1 | | CCAAUdTdT | GGUG | |
| 1 | 1 | | | | | | | |
| AD- | A- | 204 | UGACUAAACUUGAA | A- | 556 | CAUUUUUCAAGUUU | UGACUAAACUUGAAA | 908 |
| 890452. | 1690724. | | AAAUGdTdT | 1690725.1 | | AGUCAdTdT | AAUG | |
| 1 | 1 | | | | | | | |
| AD- | A- | 205 | CGCCCACCACAAAU | A- | 557 | ACUGCAUUUGUGGU | CGCCCACCACAAAUGC | 909 |
| 890139. | 1690098. | | GCAGUdTdT | 1690099.1 | | GGGCGdTdT | AGU | |
| 1 | 1 | | | | | | | |
| AD- | A- | 206 | CCUGAUUUCCCUGA | A- | 558 | GCAGGUCAGGGAAA | CCUGAUUUCCCUGAC | 910 |
| 890129. | 1690078. | | CCUGCdTdT | 1690079.1 | | UCAGGdTdT | CUGC | |
| 1 | 1 | | | | | | | |
| AD- | A- | 207 | UGAAGCAUGGUGU | A- | 559 | UCUGAAACACCAUGC | UGAAGCAUGGUGUU | 911 |
| 890320. | 1690460. | | UUCAGAdTdT | 1690461.1 | | UUCAdTdT | UCAGA | |
| 1 | 1 | | | | | | | |
| AD- | A- | 208 | AGCAGACUUGUUCC | A- | 560 | GGGUCGGAACAAGU | AGCAGACUUGUUCCG | 912 |
| 890154. | 1690128. | | GACCCdTdT | 1690129.1 | | CUGCUdTdT | ACCC | |
| 1 | 1 | | | | | | | |
| AD- | A- | 209 | GGAUUUGACUUCU | A- | 561 | UAAAAAAGAAGUCA | | |
| 890213. | 1690246. | | UUUUUAdTdT | 1690247.1 | | AAUCCdTdT | | |
| 1 | 1 | | | | | | | |
| AD- | A- | 210 | GAUGGCUUGUUCC | A- | 562 | GCAUCUGGAACAAGC | GAUGGCUUGUUCCAG | 914 |
| 890234. | 1690288. | | AGAUGCdTdT | 1690289.1 | | CAUCdTdT | AUGC | |
| 1 | 1 | | | | | | | |
| AD- | A- | 211 | CAGAACGAAAGUUA | A- | 563 | CCAUAUAACUUUCG | CAGAACGAAAGUUAU | 915 |
| 890266. | 1690352. | | UAUGGdTdT | 1690353.1 | | UUCUGdTdT | AUGG | |
| 1 | 1 | | | | | | | |
| AD- | A- | 212 | UUAUGGAAUAGUU | A- | 564 | AGAAAGAACUAUUC | UUAUGGAAUAGUUCU | 916 |
| 890347. | 1690514. | | CUUUCUdTdT | 1690515.1 | | CAUAAdTdT | UUCU | |
| 1 | 1 | | | | | | | |
| AD- | A- | 213 | AUGGUGUUUCAGA | A- | 565 | CUCAGUUCUGAAAC | AUGGUGUUUCAGAAC | 917 |
| 890321. | 1690462. | | ACUGAGdTdT | 1690463.1 | | ACCAUdTdT | UGAG | |
| 1 | 1 | | | | | | | |
| AD- | A- | 214 | UCCUGGAAUAUUA | A- | 566 | GGCAUCUAAUAUUC | UCCUGGAAUAUUAGA | 918 |
| 890305. | 1690430. | | GAUGCCdTdT | 1690431.1 | | CAGGAdTdT | UGCC | |
| 1 | 1 | | | | | | | |
| AD- | A- | 215 | AGGACCAGAUUGCU | A- | 567 | GAGUAAGCAAUCUG | AGGACCAGAUUGCUU | 919 |
| 890160. | 1690140. | | UACUCdTdT | 1690141.1 | | GUCCUdTdT | ACUC | |
| 1 | 1 | | | | | | | |
| AD- | A- | 216 | UGGUGACACCCUGA | A- | 568 | GAGAGUCAGGGUGU | UGGUGACACCCUGAC | 920 |
| 890130. | 1690080. | | CUCUCdTdT | 1690081.1 | | CACCAdTdT | UCUC | |
| 1 | 1 | | | | | | | |
| AD- | A- | 217 | AUUUGACUUCUUU | A- | 569 | CUUAAAAAAGAAGU | | |
| 890215. | 1690250. | | UUUAAGdTdT | 1690251.1 | | CAAAUdTdT | | |
| 1 | 1 | | | | | | | |
| AD- | A- | 218 | CUUCAGGCCCAAUA | A- | 570 | UACAAUAUUGGGCC | CUUCAGGCCCAAUAU | 922 |
| 890180. | 1690180. | | UUGUAdTdT | 1690181.1 | | UGAAGdTdT | UGUA | |
| 1 | 1 | | | | | | | |
| AD- | A- | 219 | UGGAAGCUACUUU | A- | 571 | CUAGUCAAAGUAGC | UGGAAGCUACUUUGA | 923 |
| 890469. | 1690758. | | GACUAGdTdT | 1690759.1 | | UUCCAdTdT | CUAG | |
| 1 | 1 | | | | | | | |
| AD- | A- | 220 | UAACCAGCUUCCUG | A- | 572 | GACUUCAGGAAGCU | UAACCAGCUUCCUGA | 924 |
| 890143. | 1690106. | | AAGUCdTdT | 1690107.1 | | GGUUAdTdT | AGUC | |
| 1 | 1 | | | | | | | |
| AD- | A- | 221 | AAAAAUGUUCUCAA | A- | 573 | CAUUUUUGAGAACA | AAAAAUGUUCUCAAA | 925 |
| 890306. | 1690432. | | AAAUGdTdT | 1690433.1 | | UUUUUdTdT | AAUG | |
| 1 | 1 | | | | | | | |
| AD- | A- | 222 | UAGCAGACUUGUU | A- | 574 | GGUCGGAACAAGUC | UAGCAGACUUGUUCC | 926 |
| 890153. | 1690126. | | CCGACCdTdT | 1690127.1 | | UGCUAdTdT | GACC | |
| 1 | 1 | | | | | | | |
| AD- | A- | 223 | UUCCCCUCAGCUAA | A- | 575 | CGUCAUUAGCUGAG | UUCCCCUCAGCUAAU | 927 |
| 890403. | 1690626. | | UGACGdTdT | 1690627.1 | | GGGAAdTdT | GACG | |
| 1 | 1 | | | | | | | |
| AD- | A- | 224 | UGGGCAGUAUUUU | A- | 576 | CAGCACAAAAUACUG | UGGGCAGUAUUUUG | 928 |
| 890284. | 1690388. | | GUGCUGdTdT | 1690389.1 | | CCCAdTdT | UGCUG | |
| 1 | 1 | | | | | | | |
| AD- | A- | 225 | ACCCAAGGACCAGA | A- | 577 | AGCAAUCUGGUCCU | ACCCAAGGACCAGAU | 929 |
| 890157. | 1690134. | | UUGCUdTdT | 1690135.1 | | UGGGUdTdT | UGCU | |
| 1 | 1 | | | | | | | |
| AD- | A- | 226 | GGAAGCUACUUUG | A- | 578 | ACUAGUCAAAGUAG | GGAAGCUACUUUGAC | 930 |
| 890470. | 1690760. | | ACUAGUdTdT | 1690761.1 | | CUUCCdTdT | UAGU | |
| 1 | 1 | | | | | | | |
| AD- | A- | 227 | CCCAAUAUUGUAAU | A- | 579 | CUGAAAUUACAAUA | CCCAAUAUUGUAAUU | 931 |
| 890187. | 1690194. | | UUCAGdTdT | 1690195.1 | | UUGGGdTdT | UCAG | |
| 1 | 1 | | | | | | | |
| AD- | A- | 228 | CUUUGGGCAGUAU | A- | 580 | CACAAAAUACUGCCC | CUUUGGGCAGUAUUU | 932 |
| 890281. | 1690382. | | UUUGUGdTdT | 1690383.1 | | AAAGdTdT | UGUG | |
| 1 | 1 | | | | | | | |
| AD- | A- | 229 | UUGUUUAAAACCCA | A- | 581 | GAUAUUGGGUUUUA | UUGUUUAAAACCCAA | 933 |
| 890425. | 1690670. | | AUAUCdTdT | 1690671.1 | | AACAAdTdT | UAUC | |
| 1 | 1 | | | | | | | |
| AD- | A- | 230 | CCUGGUCCUGAUU | A- | 582 | CAGGGAAAUCAGGA | CCUGGUCCUGAUUUC | 934 |
| 890127. | 1690074. | | UCCCUGdTdT | 1690075.1 | | CCAGGdTdT | CCUG | |
| 1 | 1 | | | | | | | |
| AD- | A- | 231 | UUCCAGAUGCAUU | A- | 583 | GGUUAAAAUGCAUC | UUCCAGAUGCAUUUU | 935 |
| 890238. | 1690296. | | UUAACCdTdT | 1690297.1 | | UGGAAdTdT | AACC | |
| 1 | 1 | | | | | | | |
| AD- | A- | 232 | AAAUGACAACACUU | A- | 584 | GCUUCAAGUGUUGU | AAAUGACAACACUUG | 936 |
| 890311. | 1690442. | | GAAGCdTdT | 1690443.1 | | CAUUUdTdT | AAGC | |
| 1 | 1 | | | | | | | |
| AD- | A- | 233 | CCAAAUAUGGCUGG | A- | 585 | GCAUUCCAGCCAUAU | CCAAAUAUGGCUGGA | 937 |
| 890355. | 1690530. | | AAUGCdTdT | 1690531.1 | | UUGGdTdT | AUGC | |
| 1 | 1 | | | | | | | |
| AD- | A- | 234 | CUCAAUGCUUCAAU | A- | 586 | GGGACAUUGAAGCA | CUCAAUGCUUCAAUG | 938 |
| 890334. | 1690488. | | GUCCCdTdT | 1690489.1 | | UUGAGdTdT | UCCC | |
| 1 | 1 | | | | | | | |
| AD- | A- | 235 | ACCAGCUUCCUGAA | A- | 587 | GUGACUUCAGGAAG | ACCAGCUUCCUGAAG | 939 |
| 890144. | 1690108. | | GUCACdTdT | 1690109.1 | | CUGGUdTdT | UCAC | |
| 1 | 1 | | | | | | | |
| AD- | A- | 236 | CCUUGGAUUUGAC | A- | 588 | AAAGAAGUCAAAUCC | | |
| 890209. | 1690238. | | UUCUUUdTdT | 1690239.1 | | AAGGdTdT | | |
| 1 | 1 | | | | | | | |
| AD- | A- | 237 | UUCCAUAGAUCUG | A- | 589 | CAGAUCCAGAUCUA | UUCCAUAGAUCUGGA | 941 |
| 890375. | 1690570. | | GAUCUGdTdT | 1690571.1 | | UGGAAdTdT | UCUG | |
| 1 | 1 | | | | | | | |
| AD- | A- | 238 | AACUUCAGGCCCAA | A- | 590 | CAAUAUUGGGCCUG | AACUUCAGGCCCAAU | 942 |
| 890178. | 1690176. | | UAUUGdTdT | 1690177.1 | | AAGUUdTdT | AUUG | |
| 1 | 1 | | | | | | | |
| AD- | A- | 239 | AAGAGUUAUCGCCA | A- | 591 | CACACUGGCGAUAAC | AAGAGUUAUCGCCAG | 943 |
| 890254. | 1690328. | | GUGUGdTdT | 1690329.1 | | UCUUdTdT | UGUG | |
| 1 | 1 | | | | | | | |
| AD- | A- | 240 | UCAGGAUGCGAUG | A- | 592 | CAUAGACAUCGCAUC | UCAGGAUGCGAUGUC | 944 |
| 890198. | 1690216. | | UCUAUGdTdT | 1690217.1 | | CUGAdTdT | UAUG | |
| 1 | 1 | | | | | | | |
| AD- | A- | 241 | UCCAGAUGCAUUU | A- | 593 | UGGUUAAAAUGCAU | UCCAGAUGCAUUUUA | 945 |
| 890239. | 1690298. | | UAACCAdTdT | 1690299.1 | | CUGGAdTdT | ACCA | |
| 1 | 1 | | | | | | | |
| AD- | A- | 242 | ACUGAGGUGACCU | A- | 594 | UCCUGAAGGUCACC | ACUGAGGUGACCUUC | 946 |
| 890364. | 1690548. | | UCAGGAdTdT | 1690549.1 | | UCAGUdTdT | AGGA | |
| 1 | 1 | | | | | | | |
| AD- | A- | 243 | GAUUUGACUUCUU | A- | 595 | UUAAAAAAGAAGUC | | |
| 890214. | 1690248. | | UUUUAAdTdT | 1690249.1 | | AAAUCdTdT | | |
| 1 | 1 | | | | | | | |
| AD- | A- | 244 | CUGGUCCUGAUUU | A- | 596 | UCAGGGAAAUCAGG | CUGGUCCUGAUUUCC | 948 |
| 890128. | 1690076. | | CCCUGAdTdT | 1690077.1 | | ACCAGdTdT | CUGA | |
| 1 | 1 | | | | | | | |
| AD- | A- | 245 | ACACUGAAGAGUUA | A- | 597 | GGCGAUAACUCUUC | ACACUGAAGAGUUAU | 949 |
| 890250. | 1690320. | | UCGCCdTdT | 1690321.1 | | AGUGUdTdT | CGCC | |
| 1 | 1 | | | | | | | |
| AD- | A- | 246 | AAAUCACCACUCUU | A- | 598 | GCCCAAAGAGUGGU | AAAUCACCACUCUUU | 950 |
| 890274. | 1690368. | | UGGGCdTdT | 1690369.1 | | GAUUUdTdT | GGGC | |
| 1 | 1 | | | | | | | |
| AD- | A- | 247 | ACCCAGGGACCAUC | A- | 599 | ACUUUGAUGGUCCC | ACCCAGGGACCAUCAA | 951 |
| 890288. | 1690396. | | AAAGUdTdT | 1690397.1 | | UGGGUdTdT | AGU | |
| 1 | 1 | | | | | | | |
| AD- | A- | 248 | CCCAGGGACCAUCA | A- | 600 | CACUUUGAUGGUCC | CCCAGGGACCAUCAAA | 952 |
| 890289. | 1690398. | | AAGUGdTdT | 1690399.1 | | CUGGGdTdT | GUG | |
| 1 | 1 | | | | | | | |
| AD- | A- | 249 | UGACAACACUUGAA | A- | 601 | CAUGCUUCAAGUGU | UGACAACACUUGAAG | 953 |
| 890312. | 1690444. | | GCAUGdTdT | 1690445.1 | | UGUCAdTdT | CAUG | |
| 1 | 1 | | | | | | | |
| AD- | A- | 250 | UUCUUAUUGGUGA | A- | 602 | UCCACGUCACCAAUA | UUCUUAUUGGUGACG | 954 |
| 890230. | 1690280. | | CGUGGAdTdT | 1690281.1 | | AGAAdTdT | UGGA | |
| 1 | 1 | | | | | | | |
| AD- | A- | 251 | CACUUCGAGCCUCA | A- | 603 | GCAUGUGAGGCUCG | CACUUCGAGCCUCACA | 955 |
| 890146. | 1690112. | | CAUGCdTdT | 1690113.1 | | AAGUGdTdT | UGC | |
| 1 | 1 | | | | | | | |
| AD- | A- | 252 | CUUCUUAUUGGUG | A- | 604 | CCACGUCACCAAUAA | CUUCUUAUUGGUGAC | 956 |
| 890229. | 1690278. | | ACGUGGdTdT | 1690279.1 | | GAAGdTdT | GUGG | |
| 1 | 1 | | | | | | | |
| AD- | A- | 253 | AUGGAAUAGUUCU | A- | 605 | GGAGAAAGAACUAU | AUGGAAUAGUUCUUU | 957 |
| 890349. | 1690518. | | UUCUCCdTdT | 1690519.1 | | UCCAUdTdT | CUCC | |
| 1 | 1 | | | | | | | |
| AD- | A- | 254 | AAAAUCACCACUCU | A- | 606 | CCCAAAGAGUGGUG | AAAAUCACCACUCUU | 958 |
| 890273. | 1690366. | | UUGGGdTdT | 1690367.1 | | AUUUUdTdT | UGGG | |
| 1 | 1 | | | | | | | |
| AD- | A- | 255 | CUUGGAUUUGACU | A- | 607 | AAAAGAAGUCAAAUC | | |
| 890210. | 1690240. | | UCUUUUdTdT | 1690241.1 | | CAAGdTdT | | |
| 1 | 1 | | | | | | | |
| AD- | A- | 256 | UGUCCUGGAAUAU | A- | 608 | CAUCUAAUAUUCCA | UGUCCUGGAAUAUUA | 960 |
| 890303. | 1690426. | | UAGAUGdTdT | 1690427.1 | | GGACAdTdT | GAUG | |
| 1 | 1 | | | | | | | |
| AD- | A- | 257 | AGGAGGGAAACAU | A- | 609 | GUAACCAUGUUUCC | AGGAGGGAAACAUGG | 961 |
| 890122. | 1690064. | | GGUUACdTdT | 1690065.1 | | CUCCUdTdT | UUAC | |
| 1 | 1 | | | | | | | |
| AD- | A- | 258 | AAGCAACCAACUUC | A- | 610 | GGCCUGAAGUUGGU | AAGCAACCAACUUCA | 962 |
| 890176. | 1690172. | | AGGCCdTdT | 1690173.1 | | UGCUUdTdT | GGCC | |
| 1 | 1 | | | | | | | |
| AD- | A- | 259 | AUGUCAGUUGUUU | A- | 611 | GGUUUUAAACAACU | AUGUCAGUUGUUUAA | 963 |
| 890423. | 1690666. | | AAAACCdTdT | 1690667.1 | | GACAUdTdT | AACC | |
| 1 | 1 | | | | | | | |
| AD- | A- | 260 | UAUGUCAGUUGUU | A- | 612 | GUUUUAAACAACUG | UAUGUCAGUUGUUU | 964 |
| 890422. | 1690664. | | UAAAACdTdT | 1690665.1 | | ACAUAdTdT | AAAAC | |
| 1 | 1 | | | | | | | |
| AD- | A- | 261 | AAUUUCAGGAUGC | A- | 613 | GACAUCGCAUCCUGA | AAUUUCAGGAUGCGA | 965 |
| 890196. | 1690212. | | GAUGUCdTdT | 1690213.1 | | AAUUdTdT | UGUC | |
| 1 | 1 | | | | | | | |
| AD- | A- | 262 | UUCAGGCCCAAUAU | A- | 614 | UUACAAUAUUGGGC | UUCAGGCCCAAUAUU | 966 |
| 890181. | 1690182. | | UGUAAdTdT | 1690183.1 | | CUGAAdTdT | GUAA | |
| 1 | 1 | | | | | | | |
| AD- | A- | 263 | UCAGACAGCAUUGG | A- | 615 | GAAAUCCAAUGCUG | UCAGACAGCAUUGGA | 967 |
| 890384. | 1690588. | | AUUUCdTdT | 1690589.1 | | UCUGAdTdT | UUUC | |
| 1 | 1 | | | | | | | |
| AD- | A- | 264 | AAGCUACUUUGACU | A- | 616 | AAACUAGUCAAAGU | AAGCUACUUUGACUA | 968 |
| 890471. | 1690762. | | AGUUUdTdT | 1690763.1 | | AGCUUdTdT | GUUU | |
| 1 | 1 | | | | | | | |
| AD- | A- | 265 | GGGACCAUCAAAGU | A- | 617 | CUCCCACUUUGAUG | GGGACCAUCAAAGUG | 969 |
| 890293. | 1690406. | | GGGAGdTdT | 1690407.1 | | GUCCCdTdT | GGAG | |
| 1 | 1 | | | | | | | |
| AD- | A- | 266 | UGACACCCUGACUC | A- | 618 | ACUGAGAGUCAGGG | UGACACCCUGACUCU | 970 |
| 890131. | 1690082. | | UCAGUdTdT | 1690083.1 | | UGUCAdTdT | CAGU | |
| 1 | 1 | | | | | | | |
| AD- | A- | 267 | CAAUAUUGUAAUU | A- | 619 | UCCUGAAAUUACAA | CAAUAUUGUAAUUUC | 971 |
| 890189. | 1690198. | | UCAGGAdTdT | 1690199.1 | | UAUUGdTdT | AGGA | |
| 1 | 1 | | | | | | | |
| AD- | A- | 268 | AAAGCAACCAACUU | A- | 620 | GCCUGAAGUUGGUU | AAAGCAACCAACUUCA | 972 |
| 890175. | 1690170. | | CAGGCdTdT | 1690171.1 | | GCUUUdTdT | GGC | |
| 1 | 1 | | | | | | | |
| AD- | A- | 269 | UGCUUACUCAGACA | A- | 621 | GCUGGUGUCUGAGU | UGCUUACUCAGACAC | 973 |
| 890164. | 1690148. | | CCAGCdTdT | 1690149.1 | | AAGCAdTdT | CAGC | |
| 1 | 1 | | | | | | | |
| AD- | A- | 270 | AGGCCCAAUAUUGU | A- | 622 | AAAUUACAAUAUUG | AGGCCCAAUAUUGUA | 974 |
| 890184. | 1690188. | | AAUUUdTdT | 1690189.1 | | GGCCUdTdT | AUUU | |
| 1 | 1 | | | | | | | |
| AD- | A- | 271 | UCUUUCCUUGGAU | A- | 623 | AGUCAAAUCCAAGGA | | |
| 890206. | 1690232. | | UUGACUdTdT | 1690233.1 | | AAGAdTdT | | |
| 1 | 1 | | | | | | | |
| AD- | A- | 272 | UGGGCCAGUAAUG | A- | 624 | GGUUCCCAUUACUG | UGGGCCAGUAAUGGG | 976 |
| 890299. | 1690418. | | GGAACCdTdT | 1690419.1 | | GCCCAdTdT | AACC | |
| 1 | 1 | | | | | | | |
| AD- | A- | 273 | AGCAACCAACUUCA | A- | 625 | GGGCCUGAAGUUGG | AGCAACCAACUUCAG | 977 |
| 890177. | 1690174. | | GGCCCdTdT | 1690175.1 | | UUGCUdTdT | GCCC | |
| 1 | 1 | | | | | | | |
| AD- | A- | 274 | UUUUUUAAGGAUU | A- | 626 | CCCAAGAAUCCUUAA | | |
| 890223. | 1690266. | | CUUGGGdTdT | 1690267.1 | | AAAAdTdT | | |
| 1 | 1 | | | | | | | |
| AD- | A- | 275 | UGGAUUUGACUUC | A- | 627 | AAAAAAGAAGUCAAA | | |
| 890212. | 1690244. | | UUUUUUdTdT | 1690245.1 | | UCCAdTdT | | |
| 1 | 1 | | | | | | | |
| AD- | A- | 276 | AGGGACCAUCAAAG | A- | 628 | UCCCACUUUGAUGG | AGGGACCAUCAAAGU | 980 |
| 890292. | 1690404. | | UGGGAdTdT | 1690405.1 | | UCCCUdTdT | GGGA | |
| 1 | 1 | | | | | | | |
| AD- | A- | 277 | GACACCCUGACUCU | A- | 629 | CACUGAGAGUCAGG | GACACCCUGACUCUCA | 981 |
| 890132. | 1690084. | | CAGUGdTdT | 1690085.1 | | GUGUCdTdT | GUG | |
| 1 | 1 | | | | | | | |
| AD- | A- | 278 | ACGCCCACCACAAA | A- | 630 | CUGCAUUUGUGGUG | ACGCCCACCACAAAUG | 982 |
| 890138. | 1690096. | | UGCAGdTdT | 1690097.1 | | GGCGUdTdT | CAG | |
| 1 | 1 | | | | | | | |
| AD- | A- | 279 | UUUUUUAUUGCCA | A- | 631 | ACAAAAUGGCAAUAA | UUUUUUAUUGCCAU | 983 |
| 890441. | 1690702. | | UUUUGUdTdT | 1690703.1 | | AAAAdTdT | UUUGU | |
| 1 | 1 | | | | | | | |
| AD- | A- | 280 | UUUCCUAAAGGUG | A- | 632 | CCUGAGCACCUUUA | UUUCCUAAAGGUGCU | 984 |
| 890394. | 1690608. | | CUCAGGdTdT | 1690609.1 | | GGAAAdTdT | CAGG | |
| 1 | 1 | | | | | | | |
| AD- | A- | 281 | UUAAAACUGUGAA | A- | 633 | CAUUUAUUCACAGU | UUAAAACUGUGAAUA | 985 |
| 890458. | 1690736. | | UAAAUGdTdT | 1690737.1 | | UUUAAdTdT | AAUG | |
| 1 | 1 | | | | | | | |
| AD- | A- | 282 | AUCUUUCCUUGGA | A- | 634 | GUCAAAUCCAAGGAA | | |
| 890205. | 1690230. | | UUUGACdTdT | 1690231.1 | | AGAUdTdT | | |
| 1 | 1 | | | | | | | |
| AD- | A- | 283 | AUCACCACUCUUUG | A- | 635 | CUGCCCAAAGAGUG | AUCACCACUCUUUGG | 987 |
| 890276. | 1690372. | | GGCAGdTdT | 1690373.1 | | GUGAUdTdT | GCAG | |
| 1 | 1 | | | | | | | |
| AD- | A- | 284 | UGGAUCCUUGCCAU | A- | 636 | GGGGAAUGGCAAGG | UGGAUCCUUGCCAUU | 988 |
| 890398. | 1690616. | | UCCCCdTdT | 1690617.1 | | AUCCAdTdT | CCCC | |
| 1 | 1 | | | | | | | |
| AD- | A- | 285 | UGAGGUGACCUUC | A- | 637 | CUUCCUGAAGGUCA | UGAGGUGACCUUCAG | 989 |
| 890365. | 1690550. | | AGGAAGdTdT | 1690551.1 | | CCUCAdTdT | GAAG | |
| 1 | 1 | | | | | | | |
| AD- | A- | 286 | AGCUUCUUAUUGG | A- | 638 | ACGUCACCAAUAAGA | AGCUUCUUAUUGGUG | 990 |
| 890227. | 1690274. | | UGACGUdTdT | 1690275.1 | | AGCUdTdT | ACGU | |
| 1 | 1 | | | | | | | |
| AD- | A- | 287 | ACACCCUGACUCUC | A- | 639 | GCACUGAGAGUCAG | ACACCCUGACUCUCAG | 991 |
| 890133. | 1690086. | | AGUGCdTdT | 1690087.1 | | GGUGUdTdT | UGC | |
| 1 | 1 | | | | | | | |
| AD- | A- | 288 | UUGGAUUUGACUU | A- | 640 | AAAAAGAAGUCAAA | | |
| 890211. | 1690242. | | CUUUUUdTdT | 1690243.1 | | UCCAAdTdT | | |
| 1 | 1 | | | | | | | |
| AD- | A- | 289 | AUUUUGUGCUGGA | A- | 641 | GGGUUUUCCAGCAC | AUUUUGUGCUGGAAA | 993 |
| 890286. | 1690392. | | AAACCCdTdT | 1690393.1 | | AAAAUdTdT | ACCC | |
| 1 | 1 | | | | | | | |
| AD- | A- | 290 | GAAGUAUAUUUUU | A- | 642 | GCAAUAAAAAAUAU | GAAGUAUAUUUUUU | 994 |
| 890437. | 1690694. | | UAUUGCdTdT | 1690695.1 | | ACUUCdTdT | AUUGC | |
| 1 | 1 | | | | | | | |
| AD- | A- | 291 | UACUGAAAACCUUU | A- | 643 | CCUUUAAAGGUUUU | UACUGAAAACCUUUA | 995 |
| 890416. | 1690652. | | AAAGGdTdT | 1690653.1 | | CAGUAdTdT | AAGG | |
| 1 | 1 | | | | | | | |
| AD- | A- | 292 | AAUAGCAGACUUGU | A- | 644 | UCGGAACAAGUCUG | AAUAGCAGACUUGUU | 996 |
| 890151. | 1690122. | | UCCGAdTdT | 1690123.1 | | CUAUUdTdT | CCGA | |
| 1 | 1 | | | | | | | |
| AD- | A- | 293 | AUUUUUUAUUGCC | A- | 645 | CAAAAUGGCAAUAAA | AUUUUUUAUUGCCAU | 997 |
| 890440. | 1690700. | | AUUUUGdTdT | 1690701.1 | | AAAUdTdT | UUUG | |
| 1 | 1 | | | | | | | |
| AD- | A- | 294 | UUGGGCAGUAUUU | A- | 646 | AGCACAAAAUACUGC | UUGGGCAGUAUUUU | 998 |
| 890283. | 1690386. | | UGUGCUdTdT | 1690387.1 | | CCAAdTdT | GUGCU | |
| 1 | 1 | | | | | | | |
| AD- | A- | 295 | UCUCAAUGCUUCAA | A- | 647 | GGACAUUGAAGCAU | UCUCAAUGCUUCAAU | 999 |
| 890333. | 1690486. | | UGUCCdTdT | 1690487.1 | | UGAGAdTdT | GUCC | |
| 1 | 1 | | | | | | | |
| AD- | A- | 296 | UUAAAUUUGUGAU | A- | 648 | GUGAAAAUCACAAA | UUAAAUUUGUGAUU | 1000 |
| 890325. | 1690470. | | UUUCACdTdT | 1690471.1 | | UUUAAdTdT | UUCAC | |
| 1 | 1 | | | | | | | |
| AD- | A- | 297 | UCAGAACGAAAGUU | A- | 649 | CAUAUAACUUUCGU | UCAGAACGAAAGUUA | 1001 |
| 890265. | 1690350. | | AUAUGdTdT | 1690351.1 | | UCUGAdTdT | UAUG | |
| 1 | 1 | | | | | | | |
| AD- | A- | 298 | UUUAUUGCCAUUU | A- | 650 | AGGACAAAAUGGCA | UUUAUUGCCAUUUU | 1002 |
| 890444. | 1690708. | | UGUCCUdTdT | 1690709.1 | | AUAAAdTdT | GUCCU | |
| 1 | 1 | | | | | | | |
| AD- | A- | 299 | UUUGGGCAGUAUU | A- | 651 | GCACAAAAUACUGCC | UUUGGGCAGUAUUU | 1003 |
| 890282. | 1690384. | | UUGUGCdTdT | 1690385.1 | | CAAAdTdT | UGUGC | |
| 1 | 1 | | | | | | | |
| AD- | A- | 300 | AAAUGUUUUUAAA | A- | 652 | CACAGUUUUAAAAA | AAAUGUUUUUAAAAC | 1004 |
| 890456. | 1690732. | | ACUGUGdTdT | 1690733.1 | | CAUUUdTdT | UGUG | |
| 1 | 1 | | | | | | | |
| AD- | A- | 301 | ACUGAAAACCUUUA | A- | 653 | CCCUUUAAAGGUUU | ACUGAAAACCUUUAA | 1005 |
| 890417. | 1690654. | | AAGGGdTdT | 1690655.1 | | UCAGUdTdT | AGGG | |
| 1 | 1 | | | | | | | |
| AD- | A- | 302 | UUGUGAUCAACCAG | A- | 654 | CCCUCCUGGUUGAU | UUGUGAUCAACCAGG | 1006 |
| 890117. | 1690054. | | GAGGGdTdT | 1690055.1 | | CACAAdTdT | AGGG | |
| 1 | 1 | | | | | | | |
| AD- | A- | 303 | CAUUUUCUUUAAA | A- | 655 | CACAAAUUUAAAGAA | CAUUUUCUUUAAAUU | 1007 |
| 890323. | 1690466. | | UUUGUGdTdT | 1690467.1 | | AAUGdTdT | UGUG | |
| 1 | 1 | | | | | | | |
| AD- | A- | 304 | CUUUUUUAAGGAU | A- | 656 | CCAAGAAUCCUUAAA | | |
| 890222. | 1690264. | | UCUUGGdTdT | 1690265.1 | | AAAGdTdT | | |
| 1 | 1 | | | | | | | |
| AD- | A- | 305 | AAACGCCCACCACAA | A- | 657 | GCAUUUGUGGUGGG | AAACGCCCACCACAAA | 1009 |
| 890136. | 1690092. | | AUGCdTdT | 1690093.1 | | CGUUUdTdT | UGC | |
| 1 | 1 | | | | | | | |
| AD- | A- | 306 | AAAUAGCAGACUUG | A- | 658 | CGGAACAAGUCUGC | AAAUAGCAGACUUGU | 1010 |
| 890150. | 1690120. | | UUCCGdTdT | 1690121.1 | | UAUUUdTdT | UCCG | |
| 1 | 1 | | | | | | | |
| AD- | A- | 307 | GAGCUUCUUAUUG | A- | 659 | CGUCACCAAUAAGAA | GAGCUUCUUAUUGGU | 1011 |
| 890226. | 1690272. | | GUGACGdTdT | 1690273.1 | | GCUCdTdT | GACG | |
| 1 | 1 | | | | | | | |
| AD- | A- | 308 | CAGAUAUUAAUUU | A- | 660 | UAUGGAAAAUUAAU | CAGAUAUUAAUUUUC | 1012 |
| 890367. | 1690554. | | UCCAUAdTdT | 1690555.1 | | AUCUGdTdT | CAUA | |
| 1 | 1 | | | | | | | |
| AD- | A- | 309 | UAUUGUAAUUUCA | A- | 661 | GCAUCCUGAAAUUA | UAUUGUAAUUUCAGG | 1013 |
| 890191. | 1690202. | | GGAUGCdTdT | 1690203.1 | | CAAUAdTdT | AUGC | |
| 1 | 1 | | | | | | | |
| AD- | A- | 310 | UGUGAUUUUCACA | A- | 662 | GAAAAAUGUGAAAA | UGUGAUUUUCACAUU | 1014 |
| 890328. | 1690476. | | UUUUUCdTdT | 1690477.1 | | UCACAdTdT | UUUC | |
| 1 | 1 | | | | | | | |
| AD- | A- | 311 | UGACGUGGAACUG | A- | 663 | CCUUUUCAGUUCCA | UGACGUGGAACUGAA | 1015 |
| 890232. | 1690284. | | AAAAGGdTdT | 1690285.1 | | CGUCAdTdT | AAGG | |
| 1 | 1 | | | | | | | |
| AD- | A- | 312 | GAAAGAGGAAGAG | A- | 664 | CACCCACUCUUCCUC | GAAAGAGGAAGAGUG | 1016 |
| 890354. | 1690528. | | UGGGUGdTdT | 1690529.1 | | UUUCdTdT | GGUG | |
| 1 | 1 | | | | | | | |
| AD- | A- | 313 | UUUCCUUGGAUUU | A- | 665 | GAAGUCAAAUCCAAG | | |
| 890208. | 1690236. | | GACUUCdTdT | 1690237.1 | | GAAAdTdT | | |
| 1 | 1 | | | | | | | |
| AD- | A- | 314 | UGAUCCUUUCUGA | A- | 666 | GACGCCUCAGAAAGG | UGAUCCUUUCUGAGG | 1018 |
| 890165. | 1690150. | | GGCGUCdTdT | 1690151.1 | | AUCAdTdT | CGUC | |
| 1 | 1 | | | | | | | |
| AD- | A- | 315 | AUGUCUAUGCAGA | A- | 667 | GUUACCUCUGCAUA | AUGUCUAUGCAGAGG | 1019 |
| 890204. | 1690228. | | GGUAACdTdT | 1690229.1 | | GACAUdTdT | AUUC | |
| 1 | 1 | | | | | | | |
| AD- | A- | 316 | UCAGGCCCAAUAUU | A- | 668 | AUUACAAUAUUGGG | UCAGGCCCAAUAUUG | 1020 |
| 890182. | 1690184. | | GUAAUdTdT | 1690185.1 | | CCUGAdTdT | UAAU | |
| 1 | 1 | | | | | | | |
| AD- | A- | 317 | CUUUAAAUUUGUG | A- | 669 | GAAAAUCACAAAUU | CUUUAAAUUUGUGAU | 1021 |
| 890324. | 1690468. | | AUUUUCdTdT | 1690469.1 | | UAAAGdTdT | UUUC | |
| 1 | 1 | | | | | | | |
| AD- | A- | 318 | ACUUCUUUUUUAA | A- | 670 | GAAUCCUUAAAAAA | | |
| 890220. | 1690260. | | GGAUUCdTdT | 1690261.1 | | GAAGUdTdT | | |
| 1 | 1 | | | | | | | |
| AD- | A- | 319 | UUCGAGCCUCACAU | A- | 671 | GUCGCAUGUGAGGC | UUCGAGCCUCACAUG | 1023 |
| 890148. | 1690116. | | GCGACdTdT | 1690117.1 | | UCGAAdTdT | CGAC | |
| 1 | 1 | | | | | | | |
| AD- | A- | 320 | UUUUCCAUAGAUC | A- | 672 | GAUCCAGAUCUAUG | UUUUCCAUAGAUCUG | 1024 |
| 890374. | 1690568. | | UGGAUCdTdT | 1690569.1 | | GAAAAdTdT | GAUC | |
| 1 | 1 | | | | | | | |
| AD- | A- | 321 | UAUGGAAUAGUUC | A- | 673 | GAGAAAGAACUAUU | UAUGGAAUAGUUCUU | 1025 |
| 890348. | 1690516. | | UUUCUCdTdT | 1690517.1 | | CCAUAdTdT | UCUC | |
| 1 | 1 | | | | | | | |
| AD- | A- | 322 | GACGUGGAACUGAA | A- | 674 | CCCUUUUCAGUUCC | GACGUGGAACUGAAA | 1026 |
| 890233. | 1690286. | | AAGGGdTdT | 1690287.1 | | ACGUCdTdT | AGGG | |
| 1 | 1 | | | | | | | |
| AD- | A- | 323 | AUUAAUUUUCCAU | A- | 675 | AGAUCUAUGGAAAA | AUUAAUUUUCCAUAG | 1027 |
| 890369. | 1690558. | | AGAUCUdTdT | 1690559.1 | | UUAAUdTdT | AUCU | |
| 1 | 1 | | | | | | | |
| AD- | A- | 324 | UGCAGCCUACACAA | A- | 676 | GUCCUUUGUGUAGG | UGCAGCCUACACAAA | 1028 |
| 890135. | 1690090. | | AGGACdTdT | 1690091.1 | | CUGCAdTdT | GGAC | |
| 1 | 1 | | | | | | | |
| AD- | A- | 325 | AACCAGGAGGGAAA | A- | 677 | CCAUGUUUCCCUCCU | AACCAGGAGGGAAAC | 1029 |
| 890119. | 1690058. | | CAUGGdTdT | 1690059.1 | | GGUUdTdT | AUGG | |
| 1 | 1 | | | | | | | |
| AD- | A- | 326 | UAAUUUUCCAUAG | A- | 678 | CCAGAUCUAUGGAA | UAAUUUUCCAUAGAU | 1030 |
| 890371. | 1690562. | | AUCUGGdTdT | 1690563.1 | | AAUUAdTdT | CUGG | |
| 1 | 1 | | | | | | | |
| AD- | A- | 327 | UGUCAGUUGUUUA | A- | 679 | GGGUUUUAAACAAC | UGUCAGUUGUUUAAA | 1031 |
| 890424. | 1690668. | | AAACCCdTdT | 1690669.1 | | UGACAdTdT | ACCC | |
| 1 | 1 | | | | | | | |
| AD- | A- | 328 | UUGAAGCAUGGUG | A- | 680 | CUGAAACACCAUGCU | UUGAAGCAUGGUGU | 1032 |
| 890319. | 1690458. | | UUUCAGdTdT | 1690459.1 | | UCAAdTdT | UUCAG | |
| 1 | 1 | | | | | | | |
| AD- | A- | 329 | UCGCCUGGUCCUGA | A- | 681 | GGAAAUCAGGACCA | UCGCCUGGUCCUGAU | 1033 |
| 890125. | 1690070. | | UUUCCdTdT | 1690071.1 | | GGCGAdTdT | UUCC | |
| 1 | 1 | | | | | | | |
| AD- | A- | 330 | UAAAACUGUGAAUA | A- | 682 | CCAUUUAUUCACAG | UAAAACUGUGAAUAA | 1034 |
| 890459. | 1690738. | | AAUGGdTdT | 1690739.1 | | UUUUAdTdT | AUGG | |
| 1 | 1 | | | | | | | |
| AD- | A- | 331 | UUGGAUUUCCUAA | A- | 683 | GCACCUUUAGGAAA | UUGGAUUUCCUAAAG | 1035 |
| 890391. | 1690602. | | AGGUGCdTdT | 1690603.1 | | UCCAAdTdT | GUGC | |
| 1 | 1 | | | | | | | |
| AD- | A- | 332 | AAGUAUAUUUUUU | A- | 684 | GGCAAUAAAAAAUA | AAGUAUAUUUUUUA | 1036 |
| 890438. | 1690696. | | AUUGCCdTdT | 1690697.1 | | UACUUdTdT | UUGCC | |
| 1 | 1 | | | | | | | |
| AD- | A- | 333 | UAUUAAUUUUCCA | A- | 685 | GAUCUAUGGAAAAU | UAUUAAUUUUCCAUA | 1037 |
| 890368. | 1690556. | | UAGAUCdTdT | 1690557.1 | | UAAUAdTdT | GAUC | |
| 1 | 1 | | | | | | | |
| AD- | A- | 334 | AUAUUGUAAUUUC | A- | 686 | CAUCCUGAAAUUACA | AUAUUGUAAUUUCAG | 1038 |
| 890190. | 1690200. | | AGGAUGdTdT | 1690201.1 | | AUAUdTdT | GAUG | |
| 1 | 1 | | | | | | | |
| AD- | A- | 335 | AUCCUUUCUGAGGC | A- | 687 | GCGACGCCUCAGAAA | AUCCUUUCUGAGGCG | 1039 |
| 890167. | 1690154. | | GUCGCdTdT | 1690155.1 | | GGAUdTdT | UCGC | |
| 1 | 1 | | | | | | | |
| AD- | A- | 336 | UUUUUAUUGCCAU | A- | 688 | GACAAAAUGGCAAU | UUUUUAUUGCCAUU | 1040 |
| 890442. | 1690704. | | UUUGUCdTdT | 1690705.1 | | AAAAAdTdT | UUGUC | |
| 1 | 1 | | | | | | | |
| AD- | A- | 337 | UAGAGAAGAAAGU | A- | 689 | GCUUUAACUUUCUU | UAGAGAAGAAAGUUA | 1041 |
| 890170. | 1690160. | | UAAAGCdTdT | 1690161.1 | | CUCUAdTdT | AAGC | |
| 1 | 1 | | | | | | | |
| AD- | A- | 338 | UUUGACUUCUUUU | A- | 690 | CCUUAAAAAAGAAG | | |
| 890216. | 1690252. | | UUAAGGdTdT | 1690253.1 | | UCAAAdTdT | | |
| 1 | 1 | | | | | | | |
| AD- | A- | 339 | GCCCACCACAAAUG | A- | 691 | CACUGCAUUUGUGG | GCCCACCACAAAUGCA | 1043 |
| 890140. | 1690100. | | CAGUGdTdT | 1690101.1 | | UGGGCdTdT | GUG | |
| 1 | 1 | | | | | | | |
| AD- | A- | 340 | UAAAGCAACCAACU | A- | 692 | CCUGAAGUUGGUUG | UAAAGCAACCAACUU | 1044 |
| 890174. | 1690168. | | UCAGGdTdT | 1690169.1 | | CUUUAdTdT | CAGG | |
| 1 | 1 | | | | | | | |
| AD- | A- | 341 | UUAAAGCAACCAAC | A- | 693 | CUGAAGUUGGUUGC | UUAAAGCAACCAACU | 1045 |
| 890173. | 1690166. | | UUCAGdTdT | 1690167.1 | | UUUAAdTdT | UCAG | |
| 1 | 1 | | | | | | | |
| AD- | A- | 342 | UUGUUCCGACCCAA | A- | 694 | GGUCCUUGGGUCGG | UUGUUCCGACCCAAG | 1046 |
| 890155. | 1690130. | | GGACCdTdT | 1690131.1 | | AACAAdTdT | GACC | |
| 1 | 1 | | | | | | | |
| AD- | A- | 343 | UUAAUUUUCCAUA | A- | 695 | CAGAUCUAUGGAAA | UUAAUUUUCCAUAGA | 1047 |
| 890370. | 1690560. | | GAUCUGdTdT | 1690561.1 | | AUUAAdTdT | UCUG | |
| 1 | 1 | | | | | | | |
| AD- | A- | 344 | AACACUGAAGAGUU | A- | 696 | GCGAUAACUCUUCA | AACACUGAAGAGUUA | 1048 |
| 890249. | 1690318. | | AUCGCdTdT | 1690319.1 | | GUGUUdTdT | UCGC | |
| 1 | 1 | | | | | | | |
| AD- | A- | 345 | GACUUCUUUUUUA | A- | 697 | AAUCCUUAAAAAAGA | | |
| 890219. | 1690258. | | AGGAUUdTdT | 1690259.1 | | AGUCdTdT | | |
| 1 | 1 | | | | | | | |
| AD- | A- | 346 | UGACUUCUUUUUU | A- | 698 | AUCCUUAAAAAAGAA | | |
| 890218. | 1690256. | | AAGGAUdTdT | 1690257.1 | | GUCAdTdT | | |
| 1 | 1 | | | | | | | |
| AD- | A- | 347 | UUGACUUCUUUUU | A- | 699 | UCCUUAAAAAAGAA | | |
| 890217. | 1690254. | | UAAGGAdTdT | 1690255.1 | | GUCAAdTdT | | |
| 1 | 1 | | | | | | | |
| AD- | A- | 348 | AAACACUGAAGAGU | A- | 700 | CGAUAACUCUUCAG | AAACACUGAAGAGUU | 1052 |
| 890248. | 1690316. | | UAUCGdTdT | 1690317.1 | | UGUUUdTdT | AUCG | |
| 1 | 1 | | | | | | | |
| AD- | A- | 349 | AUUAUGGAAUAGU | A- | 701 | GAAAGAACUAUUCC | AUUAUGGAAUAGUUC | 1053 |
| 890346. | 1690512. | | UCUUUCdTdT | 1690513.1 | | AUAAUdTdT | UUUC | |
| 1 | 1 | | | | | | | |
| AD- | A- | 350 | UUUUAAGGAUUCU | A- | 702 | AUCCCAAGAAUCCUU | | |
| 890225. | 1690270. | | UGGGAUdTdT | 1690271.1 | | AAAAdTdT | | |
| 1 | 1 | | | | | | | |
| AD- | A- | 351 | UCUUUUUUAAGGA | A- | 703 | CAAGAAUCCUUAAAA | | |
| 890221. | 1690262. | | UUCUUGdTdT | 1690263.1 | | AAGAdTdT | | |
| 1 | 1 | | | | | | | |
| AD- | A- | 352 | UUUUUAAGGAUUC | A- | 704 | UCCCAAGAAUCCUUA | | |
| 890224. | 1690268. | | UUGGGAdTdT | 1690269.1 | | AAAAdTdT | | |
| 1 | 1 | | | | | | | |
| AD- | A- | 353 | AUUUUAACCACAGU | A- | 705 | GGUCCACUGUGGUU | AUUUUAACCACAGUG | 1057 |
| 890243. | 1690306. | | GGACCdTdT | 1690307.1 | | AAAAUdTdT | GACC | |
| 1 | 1 | | | | | | | |
| AD- | A- | 354 | UUUUAUUGCCAUU | A- | 706 | GGACAAAAUGGCAA | UUUUAUUGCCAUUU | 1058 |
| 890443. | 1690706. | | UUGUCCdTdT | 1690707.1 | | UAAAAdTdT | UGUCC | |
| 1 | 1 | | | | | | | |

Column 1 indicates duplex name (the number following the decimal point in a duplex name merely refers to a batch production number). Column 2 indicates the name of the sense sequence. Column 3 indicates the sequence ID for the sequence of column 4. Column 4 provides the modified sequence of a sense strand suitable for use in a duplex described herein. Column 5 indicates the antisense sequence name. Column 6 indicates the sequence ID for the sequence of column 7. Column 7 provides the sequence of a modified antisense strand suitable for use in a duplex described herein, e.g., a duplex comprising the sense sequence in the same row of the table. Column 8 indicates the position in the target mRNA (NM_022746.4) that is complementary to the antisense strand of Column 7. Column 9 indicates the sequence ID for the sequence of column 8.

TABLE 2B
Exemplary Human MARC1 Unmodified Single Strands and Duplex Sequences.
Column 1 indicates duplex name (the number following the decimal point in a duplex name merely refers to a batch production
number). Column 2 indicates the sense sequence name. Column 3 indicates the sequence ID for the sequence of column 4. Column 4
provides the unmodified sequence of a sense strand suitable for use in a duplex described herein. Column 5 provides the position in
the target mRNA (NM_022746.4) of the sense strand of Column 4. Column 6 indicates the antisense sequence name. Column 7
indicates the sequence ID for the sequence of column 8. Column 8 provides the sequence of an antisense strand suitable for use in a
duplex described herein, without specifying chemical modifications. Column 9 indicates the position in the target mRNA
(NM_022746.4) that is complementary to the antisense strand of Column 8.

| | | | | mRNA | | | | |
|---|---|---|---|---|---|---|---|---|
| | Sense | Seq ID | | target | Anti-sense | Seq ID | | mRNA target |
| Duplex | sequence | NO: | | range in | sequence | NO: | antisense sequence | range in |
| Name | name | (sense) | Sense sequence (5′-3′) | NM_022746.4 | name | (antisense) | (5′-3′) | NM_022746.4 |
| AD- | A- | 1059 | CCUUCAGAACGAAAGUU | 936-954 | A- | 1411 | AUAACUUUCGUUCUGAA | 936-954 |
| 890263.1 | 1690346.1 | | AU | | 1690347.1 | | GG | |
| AD- | A- | 1060 | GAACGAAAGUUAUAUG | 942-960 | A- | 1412 | UUCCAUAUAACUUUCGU | 942-960 |
| 890268.1 | 1690356.1 | | GAA | | 1690357.1 | | UC | |
| AD- | A- | 1061 | GUUUAAAACCCAAUAUC | 1862-1880 | A- | 1413 | UAGAUAUUGGGUUUUA | 1862-1880 |
| 890427.1 | 1690674.1 | | UA | | 1690675.1 | | AAC | |
| AD- | A- | 1062 | UAUGUCCUGGAAUAUU | 1056-1074 | A- | 1414 | UCUAAUAUUCCAGGACA | 1056-1074 |
| 890301.1 | 1690422.1 | | AGA | | 1690423.1 | | UA | |
| AD- | A- | 1063 | GUAUGUCCUGGAAUAU | 1055-1073 | A- | 1415 | CUAAUAUUCCAGGACAU | 1055-1073 |
| 890300.1 | 1690420.1 | | UAG | | 1690421.1 | | AC | |
| AD- | A- | 1064 | ACCCUUCAGAACGAAAG | 934-952 | A- | 1416 | AACUUUCGUUCUGAAG | 934-952 |
| 890262.1 | 1690344.1 | | UU | | 1690345.1 | | GGU | |
| AD- | A- | 1065 | GCCCAAUAUUGUAAUU | 746-764 | A- | 1417 | UGAAAUUACAAUAUUG | 746-764 |
| 890186.1 | 1690192.1 | | UCA | | 1690193.1 | | GGC | |
| AD- | A- | 1066 | GGACCAUCAAAGUGGGA | 1003-1021 | A- | 1418 | UCUCCCACUUUGAUGGU | 1003-1021 |
| 890294.1 | 1690408.1 | | GA | | 1690409.1 | | CC | |
| AD- | A- | 1067 | AAUCACCACUCUUUGGG | 961-979 | A- | 1419 | UGCCCAAAGAGUGGUGA | 961-979 |
| 890275.1 | 1690370.1 | | CA | | 1690371.1 | | UU | |
| AD- | A- | 1068 | CUCUUUGGGCAGUAUU | 969-987 | A- | 1420 | CAAAAUACUGCCCAAAG | 969-987 |
| 890279.1 | 1690378.1 | | UUG | | 1690379.1 | | AG | |
| AD- | A- | 1069 | GAUGCGAUGUCUAUGC | 766-784 | A- | 1421 | UCUGCAUAGACAUCGCA | 766-784 |
| 890202.1 | 1690224.1 | | AGA | | 1690225.1 | | UC | |
| AD- | A- | 1070 | GGAAAAUCACCACUCUU | 957-975 | A- | 1422 | CAAAGAGUGGUGAUUU | 957-975 |
| 890271.1 | 1690362.1 | | UG | | 1690363.1 | | UCC | |
| AD- | A- | 1071 | AAUGUUCUCAAAAAUGA | 1086-1104 | A- | 1423 | UGUCAUUUUUGAGAAC | 1086-1104 |
| 890309.1 | 1690438.1 | | CA | | 1690439.1 | | AUU | |
| AD- | A- | 1072 | GUUUUGGCUUGUGAUC | 308-326 | A- | 1424 | GUUGAUCACAAGCCAAA | 308-326 |
| 890114.1 | 1690048.1 | | AAC | | 1690049.1 | | AC | |
| AD- | A- | 1073 | AGAAGAAAAGUGAUUCA | 1785-1803 | A- | 1425 | ACUGAAUCACUUUUCUU | 1785-1803 |
| 890411.1 | 1690642.1 | | GU | | 1690643.1 | | CU | |
| AD- | A- | 1074 | UCUGAUGAAGUAUAUU | 1909-1927 | A- | 1426 | AAAAAUAUACUUCAUCA | 1909-1927 |
| 890435.1 | 1690690.1 | | UUU | | 1690691.1 | | GA | |
| AD- | A- | 1075 | GGCCCAAUAUUGUAAU | 745-763 | A- | 1427 | GAAAUUACAAUAUUGG | 745-763 |
| 890185.1 | 1690190.1 | | UUC | | 1690191.1 | | GCC | |
| AD- | A- | 1076 | GGAUGCGAUGUCUAUG | 765-783 | A- | 1428 | CUGCAUAGACAUCGCAU | 765-783 |
| 890201.1 | 1690222.1 | | CAG | | 1690223.1 | | CC | |
| AD- | A- | 1077 | AAAAUGUUCUCAAAAAU | 1084-1102 | A- | 1429 | UCAUUUUUGAGAACAU | 1084-1102 |
| 890307.1 | 1690434.1 | | GA | | 1690435.1 | | UUU | |
| AD- | A- | 1078 | UGUAAUUUCAGGAUGC | 755-773 | A- | 1430 | AUCGCAUCCUGAAAUUA | 755-773 |
| 890193.1 | 1690206.1 | | GAU | | 1690207.1 | | CA | |
| AD- | A- | 1079 | AACUGAUUAUGGAAUA | 1309-1327 | A- | 1431 | AACUAUUCCAUAAUCAG | 1309-1327 |
| 890341.1 | 1690502.1 | | GUU | | 1690503.1 | | UU | |
| AD- | A- | 1080 | CACUUGAAGCAUGGUG | 1106-1124 | A- | 1432 | AAACACCAUGCUUCAAG | 1106-1124 |
| 890317.1 | 1690454.1 | | UUU | | 1690455.1 | | UG | |
| AD- | A- | 1081 | ACACUUGAAGCAUGGU | 1105-1123 | A- | 1433 | AACACCAUGCUUCAAGU | 1105-1123 |
| 890316.1 | 1690452.1 | | GUU | | 1690453.1 | | GU | |
| AD- | A- | 1082 | CAUUCCCCUCAGCUAAU | 1714-1732 | A- | 1434 | UCAUUAGCUGAGGGGA | 1714-1732 |
| 890401.1 | 1690622.1 | | GA | | 1690623.1 | | AUG | |
| AD- | A- | 1083 | GAAACACUGAAGAGUUA | 906-924 | A- | 1435 | GAUAACUCUUCAGUGU | 906-924 |
| 890247.1 | 1690314.1 | | UC | | 1690315.1 | | UUC | |
| AD- | A- | 1084 | GGACCAGAUUGCUUACU | 638-656 | A- | 1436 | UGAGUAAGCAAUCUGG | 638-656 |
| 890161.1 | 1690142.1 | | CA | | 1690143.1 | | UCC | |
| AD- | A- | 1085 | GCCAUUUUGUCCUUUG | 1932-1950 | A- | 1437 | AAUCAAAGGACAAAAUG | 1932-1950 |
| 890447.1 | 1690714.1 | | AUU | | 1690715.1 | | GC | |
| AD- | A- | 1086 | ACUCUUUGGGCAGUAU | 968-986 | A- | 1438 | AAAAUACUGCCCAAAGA | 968-986 |
| 890278.1 | 1690376.1 | | UUU | | 1690377.1 | | GU | |
| AD- | A- | 1087 | CUAAAGGUGCUCAGGA | 1659-1677 | A- | 1439 | UCCUCCUGAGCACCUUU | 1659-1677 |
| 890396.1 | 1690612.1 | | GGA | | 1690613.1 | | AG | |
| AD- | A- | 1088 | GCCAGUGUGACCCUUCA | 925-943 | A- | 1440 | UCUGAAGGGUCACACUG | 925-943 |
| 890257.1 | 1690334.1 | | GA | | 1690335.1 | | GC | |
| AD- | A- | 1089 | GAGAAGAAAAGUGAUU | 1784-1802 | A- | 1441 | CUGAAUCACUUUUCUUC | 1784-1802 |
| 890410.1 | 1690640.1 | | CAG | | 1690641.1 | | UC | |
| AD- | A- | 1090 | CAACCAGGAGGGAAACA | 323-341 | A- | 1442 | CAUGUUUCCCUCCUGGU | 323-341 |
| 890118.1 | 1690056.1 | | UG | | 1690057.1 | | UG | |
| AD- | A- | 1091 | AGAGAAGAAAGUUAAA | 716-734 | A- | 1443 | UGCUUUAACUUUCUUC | 716-734 |
| 890171.1 | 1690162.1 | | GCA | | 1690163.1 | | UCU | |
| AD- | A- | 1092 | AGUGGGAGACCCUGUG | 1013-1031 | A- | 1444 | GUACACAGGGUCUCCCA | 1013-1031 |
| 890296.1 | 1690412.1 | | UAC | | 1690413.1 | | CU | |
| AD- | A- | 1093 | GCAUUGGAUUUCCUAA | 1647-1665 | A- | 1445 | CCUUUAGGAAAUCCAAU | 1647-1665 |
| 890388.1 | 1690596.1 | | AGG | | 1690597.1 | | GC | |
| AD- | A- | 1094 | GGCUUGUUCCAGAUGC | 836-854 | A- | 1446 | AAUGCAUCUGGAACAAG | 836-854 |
| 890235.1 | 1690290.1 | | AUU | | 1690291.1 | | CC | |
| AD- | A- | 1095 | GGAUUUCCUAAAGGUG | 1652-1670 | A- | 1447 | GAGCACCUUUAGGAAAU | 1652-1670 |
| 890393.1 | 1690606.1 | | CUC | | 1690607.1 | | CC | |
| AD- | A- | 1096 | GUGACCCUUCAGAACGA | 931-949 | A- | 1448 | UUUCGUUCUGAAGGGU | 931-949 |
| 890259.1 | 1690338.1 | | AA | | 1690339.1 | | CAC | |
| AD- | A- | 1097 | CAGACAGCAUUGGAUU | 1641-1659 | A- | 1449 | GGAAAUCCAAUGCUGUC | 1641-1659 |
| 890385.1 | 1690590.1 | | UCC | | 1690591.1 | | UG | |
| AD- | A- | 1098 | GCAUUUUAACCACAGUG | 850-868 | A- | 1450 | UCCACUGUGGUUAAAAU | 850-868 |
| 890241.1 | 1690302.1 | | GA | | 1690303.1 | | GC | |
| AD- | A- | 1099 | GAGGAGAAGAAAAGUG | 1781-1799 | A- | 1451 | AAUCACUUUUCUUCUCC | 1781-1799 |
| 890408.1 | 1690636.1 | | AUU | | 1690637.1 | | UC | |
| AD- | A- | 1100 | AAGUUAUAUGGAAAAU | 948-966 | A- | 1452 | GUGAUUUUCCAUAUAAC | 948-966 |
| 890269.1 | 1690358.1 | | CAC | | 1690359.1 | | UU | |
| AD- | A- | 1101 | AGUUAUAUGGAAAAUC | 949-967 | A- | 1453 | GGUGAUUUUCCAUAUA | 949-967 |
| 890270.1 | 1690360.1 | | ACC | | 1690361.1 | | ACU | |
| AD- | A- | 1102 | UGUUUAAAACCCAAUAU | 1861-1879 | A- | 1454 | AGAUAUUGGGUUUUAA | 1861-1879 |
| 890426.1 | 1690672.1 | | CU | | 1690673.1 | | ACA | |
| AD- | A- | 1103 | UCUUAUUGGUGACGUG | 803-821 | A- | 1455 | UUCCACGUCACCAAUAA | 803-821 |
| 890231.1 | 1690282.1 | | GAA | | 1690283.1 | | GA | |
| AD- | A- | 1104 | GACCCUUCAGAACGAAA | 933-951 | A- | 1456 | ACUUUCGUUCUGAAGG | 933-951 |
| 890261.1 | 1690342.1 | | GU | | 1690343.1 | | GUC | |
| AD- | A- | 1105 | CUCUAAGAUCUGAUGAA | 1901-1919 | A- | 1457 | ACUUCAUCAGAUCUUAG | 1901-1919 |
| 890431.1 | 1690682.1 | | GU | | 1690683.1 | | AG | |
| AD- | A- | 1106 | UAAGAUCUGAUGAAGU | 1904-1922 | A- | 1458 | UAUACUUCAUCAGAUCU | 1904-1922 |
| 890432.1 | 1690684.1 | | AUA | | 1690685.1 | | UA | |
| AD- | A- | 1107 | UCACCACUCUUUGGGCA | 963-981 | A- | 1459 | ACUGCCCAAAGAGUGGU | 963-981 |
| 890277.1 | 1690374.1 | | GU | | 1690375.1 | | GA | |
| AD- | A- | 1108 | CCAAGGACCAGAUUGCU | 634-652 | A- | 1460 | UAAGCAAUCUGGUCCUU | 634-652 |
| 890159.1 | 1690138.1 | | UA | | 1690139.1 | | GG | |
| AD- | A- | 1109 | GUUCCAGAUGCAUUUU | 841-859 | A- | 1461 | GUUAAAAUGCAUCUGG | 841-859 |
| 890237.1 | 1690294.1 | | AAC | | 1690295.1 | | AAC | |
| AD- | A- | 1110 | GACUAAACUUGAAAAAU | 1964-1982 | A- | 1462 | ACAUUUUUCAAGUUUA | 1964-1982 |
| 890453.1 | 1690726.1 | | GU | | 1690727.1 | | GUC | |
| AD- | A- | 1111 | AGGAUGCGAUGUCUAU | 764-782 | A- | 1463 | UGCAUAGACAUCGCAUC | 764-782 |
| 890200.1 | 1690220.1 | | GCA | | 1690221.1 | | CU | |
| AD- | A- | 1112 | CAUUGGAUUUCCUAAA | 1648-1666 | A- | 1464 | ACCUUUAGGAAAUCCAA | 1648-1666 |
| 890389.1 | 1690598.1 | | GGU | | 1690599.1 | | UG | |
| AD- | A- | 1113 | GAUCUGAUGAAGUAUA | 1907-1925 | A- | 1465 | AAAUAUACUUCAUCAGA | 1907-1925 |
| 890433.1 | 1690686.1 | | UUU | | 1690687.1 | | uc | |
| AD- | A- | 1114 | AAAUGGAAGCUACUUU | 1999-2017 | A- | 1466 | GUCAAAGUAGCUUCCAU | 1999-2017 |
| 890466.1 | 1690752.1 | | GAC | | 1690753.1 | | UU | |
| AD- | A- | 1115 | ACUCUAAGAUCUGAUGA | 1900-1918 | A- | 1467 | CUUCAUCAGAUCUUAGA | 1900-1918 |
| 890430.1 | 1690680.1 | | AG | | 1690681.1 | | GU | |
| AD- | A- | 1116 | GACCAGAUUGCUUACUC | 639-657 | A- | 1468 | CUGAGUAAGCAAUCUGG | 639-657 |
| 890162.1 | 1690144.1 | | AG | | 1690145.1 | | UC | |
| AD- | A- | 1117 | GACCAUCAAAGUGGGAG | 1004-1022 | A- | 1469 | GUCUCCCACUUUGAUGG | 1004-1022 |
| 890295.1 | 1690410.1 | | AC | | 1690411.1 | | UC | |
| AD- | A- | 1118 | GGGAAGUUGACUAAAC | 1956-1974 | A- | 1470 | CAAGUUUAGUCAACUUC | 1956-1974 |
| 890450.1 | 1690720.1 | | UUG | | 1690721.1 | | CC | |
| AD- | A- | 1119 | CUGAUUAUGGAAUAGU | 1311-1329 | A- | 1471 | AGAACUAUUCCAUAAUC | 1311-1329 |
| 890343.1 | 1690506.1 | | UCU | | 1690507.1 | | AG | |
| AD- | A- | 1120 | AGGAGAAGAAAAGUGA | 1782-1800 | A- | 1472 | GAAUCACUUUUCUUCUC | 1782-1800 |
| 890409.1 | 1690638.1 | | UUC | | 1690639.1 | | CU | |
| AD- | A- | 1121 | CCAUUUUGUCCUUUGA | 1933-1951 | A- | 1473 | UAAUCAAAGGACAAAAU | 1933-1951 |
| 890448.1 | 1690716.1 | | UUA | | 1690717.1 | | GG | |
| AD- | A- | 1122 | AAAUGUUCUCAAAAAUG | 1085-1103 | A- | 1474 | GUCAUUUUUGAGAACA | 1085-1103 |
| 890308.1 | 1690436.1 | | AC | | 1690437.1 | | UUU | |
| AD- | A- | 1123 | UGUUCCAGAUGCAUUU | 840-858 | A- | 1475 | UUAAAAUGCAUCUGGAA | 840-858 |
| 890236.1 | 1690292.1 | | UAA | | 1690293.1 | | CA | |
| AD- | A- | 1124 | CUGGGCCAGUAAUGGG | 1035-1053 | A- | 1476 | GUUCCCAUUACUGGCCC | 1035-1053 |
| 890298.1 | 1690416.1 | | AAC | | 1690417.1 | | AG | |
| AD- | A- | 1125 | ACCAGAUUGCUUACUCA | 640-658 | A- | 1477 | UCUGAGUAAGCAAUCUG | 640-658 |
| 890163.1 | 1690146.1 | | GA | | 1690147.1 | | GU | |
| AD- | A- | 1126 | CGGGCUAGCUUUUGAA | 1543-1561 | A- | 1478 | CAUUUCAAAAGCUAGCC | 1543-1561 |
| 890359.1 | 1690538.1 | | AUG | | 1690539.1 | | CG | |
| AD- | A- | 1127 | GCGAUGUCUAUGCAGA | 769-787 | A- | 1479 | ACCUCUGCAUAGACAUC | 769-787 |
| 890203.1 | 1690226.1 | | GGU | | 1690227.1 | | GC | |
| AD- | A- | 1128 | CCCCGGGCUAGCUUUUG | 1540-1558 | A- | 1480 | UUCAAAAGCUAGCCCGG | 1540-1558 |
| 890356.1 | 1690532.1 | | AA | | 1690533.1 | | GG | |
| AD- | A- | 1129 | GAAAAUCACCACUCUUU | 958-976 | A- | 1481 | CCAAAGAGUGGUGAUU | 958-976 |
| 890272.1 | 1690364.1 | | GG | | 1690365.1 | | UUC | |
| AD- | A- | 1130 | CACUGAAGAGUUAUCGC | 910-928 | A- | 1482 | UGGCGAUAACUCUUCAG | 910-928 |
| 890251.1 | 1690322.1 | | CA | | 1690323.1 | | UG | |
| AD- | A- | 1131 | AUCUGAUGAAGUAUAU | 1908-1926 | A- | 1483 | AAAAUAUACUUCAUCAG | 1908-1926 |
| 890434.1 | 1690688.1 | | UUU | | 1690689.1 | | AU | |
| AD- | A- | 1132 | UUCAGGAUGCGAUGUC | 761-779 | A- | 1484 | AUAGACAUCGCAUCCUG | 761-779 |
| 890197.1 | 1690214.1 | | UAU | | 1690215.1 | | AA | |
| AD- | A- | 1133 | GCCUGGUCCUGAUUUCC | 364-382 | A- | 1485 | AGGGAAAUCAGGACCAG | 364-382 |
| 890126.1 | 1690072.1 | | CU | | 1690073.1 | | GC | |
| AD- | A- | 1134 | AACACUUGAAGCAUGGU | 1104-1122 | A- | 1486 | ACACCAUGCUUCAAGUG | 1104-1122 |
| 890315.1 | 1690450.1 | | GU | | 1690451.1 | | UU | |
| AD- | A- | 1135 | UGGGAAGUUGACUAAA | 1955-1973 | A- | 1487 | AAGUUUAGUCAACUUCC | 1955-1973 |
| 890449.1 | 1690718.1 | | CUU | | 1690719.1 | | CA | |
| AD- | A- | 1136 | GUAAUUUCAGGAUGCG | 756-774 | A- | 1488 | CAUCGCAUCCUGAAAUU | 756-774 |
| 890194.1 | 1690208.1 | | AUG | | 1690209.1 | | AC | |
| AD- | A- | 1137 | GGAAGUUGACUAAACU | 1957-1975 | A- | 1489 | UCAAGUUUAGUCAACUU | 1957-1975 |
| 890451.1 | 1690722.1 | | UGA | | 1690723.1 | | CC | |
| AD- | A- | 1138 | CAACACUUGAAGCAUGG | 1103-1121 | A- | 1490 | CACCAUGCUUCAAGUGU | 1103-1121 |
| 890314.1 | 1690448.1 | | UG | | 1690449.1 | | UG | |
| AD- | A- | 1139 | CUAAACUUGAAAAAUGU | 1966-1984 | A- | 1491 | AAACAUUUUUCAAGUU | 1966-1984 |
| 890455.1 | 1690730.1 | | UU | | 1690731.1 | | UAG | |
| AD- | A- | 1140 | CUUCGAGCCUCACAUGC | 578-596 | A- | 1492 | UCGCAUGUGAGGCUCGA | 578-596 |
| 890147.1 | 1690114.1 | | GA | | 1690115.1 | | AG | |
| AD- | A- | 1141 | CUGGAAACACUGAAGAG | 903-921 | A- | 1493 | AACUCUUCAGUGUUUCC | 903-921 |
| 890246.1 | 1690312.1 | | UU | | 1690313.1 | | AG | |
| AD- | A- | 1142 | GAAGAAAAGUGAUUCA | 1786-1804 | A- | 1494 | CACUGAAUCACUUUUCU | 1786-1804 |
| 890412.1 | 1690644.1 | | GUG | | 1690645.1 | | UC | |
| AD- | A- | 1143 | GUCUCAAUGCUUCAAUG | 1194-1212 | A- | 1495 | GACAUUGAAGCAUUGAG | 1194-1212 |
| 890332.1 | 1690484.1 | | UC | | 1690485.1 | | AC | |
| AD- | A- | 1144 | CUUCUCAGACAGCAUUG | 1636-1654 | A- | 1496 | UCCAAUGCUGUCUGAGA | 1636-1654 |
| 890380.1 | 1690580.1 | | GA | | 1690581.1 | | AG | |
| AD- | A- | 1145 | GAUCCUUGCCAUUCCCC | 1705-1723 | A- | 1497 | GAGGGGAAUGGCAAGG | 1705-1723 |
| 890400.1 | 1690620.1 | | UC | | 1690621.1 | | AUC | |
| AD- | A- | 1146 | UUUAAAACCCAAUAUCU | 1863-1881 | A- | 1498 | AUAGAUAUUGGGUUUU | 1863-1881 |
| 890428.1 | 1690676.1 | | AU | | 1690677.1 | | AAA | |
| AD- | A- | 1147 | UGGUGUUUCAGAACUG | 1117-1135 | A- | 1499 | UCUCAGUUCUGAAACAC | 1117-1135 |
| 890322.1 | 1690464.1 | | AGA | | 1690465.1 | | CA | |
| AD- | A- | 1148 | AGUGAUUCAGUGAUUU | 1793-1811 | A- | 1500 | CUGAAAUCACUGAAUCA | 1793-1811 |
| 890415.1 | 1690650.1 | | CAG | | 1690651.1 | | cu | |
| AD- | A- | 1149 | AGACAGCAUUGGAUUU | 1642-1660 | A- | 1501 | AGGAAAUCCAAUGCUGU | 1642-1660 |
| 890386.1 | 1690592.1 | | CCU | | 1690593.1 | | CU | |
| AD- | A- | 1150 | CAUUUUAACCACAGUGG | 851-869 | A- | 1502 | GUCCACUGUGGUUAAAA | 851-869 |
| 890242.1 | 1690304.1 | | AC | | 1690305.1 | | UG | |
| AD- | A- | 1151 | UUCAGAACGAAAGUUA | 938-956 | A- | 1503 | AUAUAACUUUCGUUCU | 938-956 |
| 890264.1 | 1690348.1 | | UAU | | 1690349.1 | | GAA | |
| AD- | A- | 1152 | GGAAUAGUUCUUUCUC | 1319-1337 | A- | 1504 | CAGGAGAAAGAACUAUU | 1319-1337 |
| 890351.1 | 1690522.1 | | CUG | | 1690523.1 | | CC | |
| AD- | A- | 1153 | AGUUAAAGCAACCAACU | 725-743 | A- | 1505 | GAAGUUGGUUGCUUUA | 725-743 |
| 890172.1 | 1690164.1 | | UC | | 1690165.1 | | ACU | |
| AD- | A- | 1154 | AUUCCCCUCAGCUAAUG | 1715-1733 | A- | 1506 | GUCAUUAGCUGAGGGG | 1715-1733 |
| 890402.1 | 1690624.1 | | AC | | 1690625.1 | | AAU | |
| AD- | A- | 1155 | CUAGAGAAGAAAGUUAA | 714-732 | A- | 1507 | CUUUAACUUUCUUCUCU | 714-732 |
| 890169.1 | 1690158.1 | | AG | | 1690159.1 | | AG | |
| AD- | A- | 1156 | CUGAUGAAGUAUAUUU | 1910-1928 | A- | 1508 | AAAAAAUAUACUUCAUC | 1910-1928 |
| 890436.1 | 1690692.1 | | UUU | | 1690693.1 | | AG | |
| AD- | A- | 1157 | UUGUGAUUUUCACAUU | 1156-1174 | A- | 1509 | AAAAAUGUGAAAAUCAC | 1156-1174 |
| 890327.1 | 1690474.1 | | UUU | | 1690475.1 | | AA | |
| AD- | A- | 1158 | GAGUUAUCGCCAGUGU | 917-935 | A- | 1510 | GUCACACUGGCGAUAAC | 917-935 |
| 890255.1 | 1690330.1 | | GAC | | 1690331.1 | | UC | |
| AD- | A- | 1159 | GACAACACUUGAAGCAU | 1101-1119 | A- | 1511 | CCAUGCUUCAAGUGUUG | 1101-1119 |
| 890313.1 | 1690446.1 | | GG | | 1690447.1 | | UC | |
| AD- | A- | 1160 | CUCAGACAGCAUUGGAU | 1639-1657 | A- | 1512 | AAAUCCAAUGCUGUCUG | 1639-1657 |
| 890383.1 | 1690586.1 | | UU | | 1690587.1 | | AG | |
| AD- | A- | 1161 | CUUUAAAGGGGGAAAA | 1828-1846 | A- | 1513 | UCCUUUUCCCCCUUUAA | 1828-1846 |
| 890421.1 | 1690662.1 | | GGA | | 1690663.1 | | AG | |
| AD- | A- | 1162 | CCAUAGAUCUGGAUCUG | 1610-1628 | A- | 1514 | GCCAGAUCCAGAUCUAU | 1610-1628 |
| 890377.1 | 1690574.1 | | GC | | 1690575.1 | | GG | |
| AD- | A- | 1163 | UGACAAGACAGGAUUCU | 1277-1295 | A- | 1515 | UCAGAAUCCUGUCUUGU | 1277-1295 |
| 890336.1 | 1690492.1 | | GA | | 1690493.1 | | CA | |
| AD- | A- | 1164 | GUGUCUCAAUGCUUCAA | 1192-1210 | A- | 1516 | CAUUGAAGCAUUGAGAC | 1192-1210 |
| 890330.1 | 1690480.1 | | UG | | 1690481.1 | | AC | |
| AD- | A- | 1165 | UGAUUAUGGAAUAGUU | 1312-1330 | A- | 1517 | AAGAACUAUUCCAUAAU | 1312-1330 |
| 890344.1 | 1690508.1 | | CUU | | 1690509.1 | | CA | |
| AD- | A- | 1166 | AUGUCCUGGAAUAUUA | 1057-1075 | A- | 1518 | AUCUAAUAUUCCAGGAC | 1057-1075 |
| 890302.1 | 1690424.1 | | GAU | | 1690425.1 | | AU | |
| AD- | A- | 1167 | CCAGAUGCAUUUUAACC | 844-862 | A- | 1519 | GUGGUUAAAAUGCAUC | 844-862 |
| 890240.1 | 1690300.1 | | AC | | 1690301.1 | | UGG | |
| AD- | A- | 1168 | UGGAGGAGAAGAAAAG | 1779-1797 | A- | 1520 | UCACUUUUCUUCUCCUC | 1779-1797 |
| 890406.1 | 1690632.1 | | UGA | | 1690633.1 | | CA | |
| AD- | A- | 1169 | UGGAUUUCCUAAAGGU | 1651-1669 | A- | 1521 | AGCACCUUUAGGAAAUC | 1651-1669 |
| 890392.1 | 1690604.1 | | GCU | | 1690605.1 | | CA | |
| AD- | A- | 1170 | AGAACGAAAGUUAUAU | 941-959 | A- | 1522 | UCCAUAUAACUUUCGUU | 941-959 |
| 890267.1 | 1690354.1 | | GGA | | 1690355.1 | | CU | |
| AD- | A- | 1171 | GGGCUAGCUUUUGAAA | 1544-1562 | A- | 1523 | CCAUUUCAAAAGCUAGC | 1544-1562 |
| 890360.1 | 1690540.1 | | UGG | | 1690541.1 | | CC | |
| AD- | A- | 1172 | CAGGCCCAAUAUUGUAA | 743-761 | A- | 1524 | AAUUACAAUAUUGGGCC | 743-761 |
| 890183.1 | 1690186.1 | | UU | | 1690187.1 | | UG | |
| AD- | A- | 1173 | AGUAUAUUUUUUAUUG | 1917-1935 | A- | 1525 | UGGCAAUAAAAAAUAUA | 1917-1935 |
| 890439.1 | 1690698.1 | | CCA | | 1690699.1 | | CU | |
| AD- | A- | 1174 | GUGGAGGAGAAGAAAA | 1778-1796 | A- | 1526 | CACUUUUCUUCUCCUCC | 1778-1796 |
| 890405.1 | 1690630.1 | | GUG | | 1690631.1 | | AC | |
| AD- | A- | 1175 | GACAGGAUUCUGAAAAC | 1283-1301 | A- | 1527 | GAGUUUUCAGAAUCCU | 1283-1301 |
| 890337.1 | 1690494.1 | | UC | | 1690495.1 | | GUC | |
| AD- | A- | 1176 | UAAAUGGAAGCUACUU | 1998-2016 | A- | 1528 | UCAAAGUAGCUUCCAUU | 1998-2016 |
| 890465.1 | 1690750.1 | | UGA | | 1690751.1 | | UA | |
| AD- | A- | 1177 | GCUUCUUAUUGGUGAC | 800-818 | A- | 1529 | CACGUCACCAAUAAGAA | 800-818 |
| 890228.1 | 1690276.1 | | GUG | | 1690277.1 | | GC | |
| AD- | A- | 1178 | ACUGAUUAUGGAAUAG | 1310-1328 | A- | 1530 | GAACUAUUCCAUAAUCA | 1310-1328 |
| 890342.1 | 1690504.1 | | UUC | | 1690505.1 | | GU | |
| AD- | A- | 1179 | GGCUAGCUUUUGAAAU | 1545-1563 | A- | 1531 | GCCAUUUCAAAAGCUAG | 1545-1563 |
| 890361.1 | 1690542.1 | | GGC | | 1690543.1 | | CC | |
| AD- | A- | 1180 | AAAACUGUGAAUAAAU | 1987-2005 | A- | 1532 | UCCAUUUAUUCACAGUU | 1987-2005 |
| 890460.1 | 1690740.1 | | GGA | | 1690741.1 | | UU | |
| AD- | A- | 1181 | GCUAGCUUUUGAAAUG | 1546-1564 | A- | 1533 | UGCCAUUUCAAAAGCUA | 1546-1564 |
| 890362.1 | 1690544.1 | | GCA | | 1690545.1 | | GC | |
| AD- | A- | 1182 | AGAAAAGUGAUUCAGU | 1788-1806 | A- | 1534 | AUCACUGAAUCACUUUU | 1788-1806 |
| 890413.1 | 1690646.1 | | GAU | | 1690647.1 | | CU | |
| AD- | A- | 1183 | GACAGCAUUGGAUUUCC | 1643-1661 | A- | 1535 | UAGGAAAUCCAAUGCUG | 1643-1661 |
| 890387.1 | 1690594.1 | | UA | | 1690595.1 | | UC | |
| AD- | A- | 1184 | ACUAAACUUGAAAAAUG | 1965-1983 | A- | 1536 | AACAUUUUUCAAGUUU | 1965-1983 |
| 890454.1 | 1690728.1 | | UU | | 1690729.1 | | AGU | |
| AD- | A- | 1185 | AAUGCUUCAAUGUCCCA | 1199-1217 | A- | 1537 | ACUGGGACAUUGAAGCA | 1199-1217 |
| 890335.1 | 1690490.1 | | GU | | 1690491.1 | | UU | |
| AD- | A- | 1186 | GUGCAGCCUACACAAAG | 412-430 | A- | 1538 | UCCUUUGUGUAGGCUG | 412-430 |
| 890134.1 | 1690088.1 | | GA | | 1690089.1 | | CAC | |
| AD- | A- | 1187 | CCGGGCUAGCUUUUGA | 1542-1560 | A- | 1539 | AUUUCAAAAGCUAGCCC | 1542-1560 |
| 890358.1 | 1690536.1 | | AAU | | 1690537.1 | | GG | |
| AD- | A- | 1188 | AAUGGAAGCUACUUUG | 2000-2018 | A- | 1540 | AGUCAAAGUAGCUUCCA | 2000-2018 |
| 890467.1 | 1690754.1 | | ACU | | 1690755.1 | | UU | |
| AD- | A- | 1189 | GGAUCCUUGCCAUUCCC | 1704-1722 | A- | 1541 | AGGGGAAUGGCAAGGA | 1704-1722 |
| 890399.1 | 1690618.1 | | CU | | 1690619.1 | | UCC | |
| AD- | A- | 1190 | AAUUUUCCAUAGAUCU | 1604-1622 | A- | 1542 | UCCAGAUCUAUGGAAAA | 1604-1622 |
| 890372.1 | 1690564.1 | | GGA | | 1690565.1 | | UU | |
| AD- | A- | 1191 | UGGAUAACCAGCUUCCU | 534-552 | A- | 1543 | UCAGGAAGCUGGUUAU | 534-552 |
| 890142.1 | 1690104.1 | | GA | | 1690105.1 | | CCA | |
| AD- | A- | 1192 | GGGCAGUAUUUUGUGC | 975-993 | A- | 1544 | CCAGCACAAAAUACUGC | 975-993 |
| 890285.1 | 1690390.1 | | UGG | | 1690391.1 | | CC | |
| AD- | A- | 1193 | AAACUGUGAAUAAAUG | 1988-2006 | A- | 1545 | UUCCAUUUAUUCACAGU | 1988-2006 |
| 890461.1 | 1690742.1 | | GAA | | 1690743.1 | | UU | |
| AD- | A- | 1194 | CAGGAGGGAAACAUGG | 327-345 | A- | 1546 | UAACCAUGUUUCCCUCC | 327-345 |
| 890121.1 | 1690062.1 | | UUA | | 1690063.1 | | UG | |
| AD- | A- | 1195 | GUCCUGGAAUAUUAGA | 1059-1077 | A- | 1547 | GCAUCUAAUAUUCCAGG | 1059-1077 |
| 890304.1 | 1690428.1 | | UGC | | 1690429.1 | | AC | |
| AD- | A- | 1196 | UCUCAGACAGCAUUGGA | 1638-1656 | A- | 1548 | AAUCCAAUGCUGUCUGA | 1638-1656 |
| 890382.1 | 1690584.1 | | UU | | 1690585.1 | | GA | |
| AD- | A- | 1197 | GACUGAGGUGACCUUCA | 1569-1587 | A- | 1549 | CCUGAAGGUCACCUCAG | 1569-1587 |
| 890363.1 | 1690546.1 | | GG | | 1690547.1 | | UC | |
| AD- | A- | 1198 | GAUUAUGGAAUAGUUC | 1313-1331 | A- | 1550 | AAAGAACUAUUCCAUAA | 1313-1331 |
| 890345.1 | 1690510.1 | | UUU | | 1690511.1 | | UC | |
| AD- | A- | 1199 | GGAGGAGAAGAAAAGU | 1780-1798 | A- | 1551 | AUCACUUUUCUUCUCCU | 1780-1798 |
| 890407.1 | 1690634.1 | | GAU | | 1690635.1 | | CC | |
| AD- | A- | 1200 | CCUAAAGGUGCUCAGGA | 1658-1676 | A- | 1552 | CCUCCUGAGCACCUUUA | 1658-1676 |
| 890395.1 | 1690610.1 | | GG | | 1690611.1 | | GG | |
| AD- | A- | 1201 | AUAACUCUAAGAUCUGA | 1897-1915 | A- | 1553 | CAUCAGAUCUUAGAGUU | 1897-1915 |
| 890429.1 | 1690678.1 | | UG | | 1690679.1 | | AU | |
| AD- | A- | 1202 | AUAAAUGGAAGCUACU | 1997-2015 | A- | 1554 | CAAAGUAGCUUCCAUUU | 1997-2015 |
| 890464.1 | 1690748.1 | | UUG | | 1690749.1 | | AU | |
| AD- | A- | 1203 | UGUCUCAAUGCUUCAA | 1193-1211 | A- | 1555 | ACAUUGAAGCAUUGAGA | 1193-1211 |
| 890331.1 | 1690482.1 | | UGU | | 1690483.1 | | CA | |
| AD- | A- | 1204 | UGGCUUGUGAUCAACCA | 312-330 | A- | 1556 | CCUGGUUGAUCACAAGC | 312-330 |
| 890115.1 | 1690050.1 | | GG | | 1690051.1 | | CA | |
| AD- | A- | 1205 | ACAGGAUUCUGAAAACU | 1284-1302 | A- | 1557 | GGAGUUUUCAGAAUCC | 1284-1302 |
| 890338.1 | 1690496.1 | | CC | | 1690497.1 | | UGU | |
| AD- | A- | 1206 | UUCUCAGACAGCAUUGG | 1637-1655 | A- | 1558 | AUCCAAUGCUGUCUGAG | 1637-1655 |
| 890381.1 | 1690582.1 | | AU | | 1690583.1 | | AA | |
| AD- | A- | 1207 | CAUAGAUCUGGAUCUG | 1611-1629 | A- | 1559 | GGCCAGAUCCAGAUCUA | 1611-1629 |
| 890378.1 | 1690576.1 | | GCC | | 1690577.1 | | UG | |
| AD- | A- | 1208 | AGUGUGACCCUUCAGAA | 928-946 | A- | 1560 | CGUUCUGAAGGGUCACA | 928-946 |
| 890258.1 | 1690336.1 | | CG | | 1690337.1 | | CU | |
| AD- | A- | 1209 | GUGAUUUUCACAUUUU | 1158-1176 | A- | 1561 | CGAAAAAUGUGAAAAUC | 1158-1176 |
| 890329.1 | 1690478.1 | | UCG | | 1690479.1 | | AC | |
| AD- | A- | 1210 | CUGAAGAGUUAUCGCCA | 912-930 | A- | 1562 | ACUGGCGAUAACUCUUC | 912-930 |
| 890253.1 | 1690326.1 | | GU | | 1690327.1 | | AG | |
| AD- | A- | 1211 | CCCCUGGAUCCUUGCCA | 1699-1717 | A- | 1563 | AAUGGCAAGGAUCCAGG | 1699-1717 |
| 890397.1 | 1690614.1 | | UU | | 1690615.1 | | GG | |
| AD- | A- | 1212 | GACCCAAGGACCAGAUU | 631-649 | A- | 1564 | GCAAUCUGGUCCUUGG | 631-649 |
| 890156.1 | 1690132.1 | | GC | | 1690133.1 | | GUC | |
| AD- | A- | 1213 | AACGCCCACCACAAAUG | 449-467 | A- | 1565 | UGCAUUUGUGGUGGGC | 449-467 |
| 890137.1 | 1690094.1 | | CA | | 1690095.1 | | GUU | |
| AD- | A- | 1214 | UUGUAAUUUCAGGAUG | 754-772 | A- | 1566 | UCGCAUCCUGAAAUUAC | 754-772 |
| 890192.1 | 1690204.1 | | CGA | | 1690205.1 | | AA | |
| AD- | A- | 1215 | GUGCUCCUUCUCCAGUU | 1737-1755 | A- | 1567 | GGAACUGGAGAAGGAGC | 1737-1755 |
| 890404.1 | 1690628.1 | | CC | | 1690629.1 | | AC | |
| AD- | A- | 1216 | CCCAAGGACCAGAUUGC | 633-651 | A- | 1568 | AAGCAAUCUGGUCCUUG | 633-651 |
| 890158.1 | 1690136.1 | | UU | | 1690137.1 | | GG | |
| AD- | A- | 1217 | AAAAUGACAACACUUGA | 1096-1114 | A- | 1569 | CUUCAAGUGUUGUCAU | 1096-1114 |
| 890310.1 | 1690440.1 | | AG | | 1690441.1 | | UUU | |
| AD- | A- | 1218 | GCUUCUCAGACAGCAUU | 1635-1653 | A- | 1570 | CCAAUGCUGUCUGAGAA | 1635-1653 |
| 890379.1 | 1690578.1 | | GG | | 1690579.1 | | GC | |
| AD- | A- | 1219 | AGCUUCCUGAAGUCACA | 543-561 | A- | 1571 | GCUGUGACUUCAGGAA | 543-561 |
| 890145.1 | 1690110.1 | | GC | | 1690111.1 | | GCU | |
| AD- | A- | 1220 | AACUGUGAAUAAAUGG | 1989-2007 | A- | 1572 | CUUCCAUUUAUUCACAG | 1989-2007 |
| 890462.1 | 1690744.1 | | AAG | | 1690745.1 | | UU | |
| AD- | A- | 1221 | AGUUAUCGCCAGUGUG | 918-936 | A- | 1573 | GGUCACACUGGCGAUAA | 918-936 |
| 890256.1 | 1690332.1 | | ACC | | 1690333.1 | | CU | |
| AD- | A- | 1222 | CCAAUAUUGUAAUUUC | 748-766 | A- | 1574 | CCUGAAAUUACAAUAUU | 748-766 |
| 890188.1 | 1690196.1 | | AGG | | 1690197.1 | | GG | |
| AD- | A- | 1223 | UUAUUGCCAUUUUGUC | 1927-1945 | A- | 1575 | AAGGACAAAAUGGCAAU | 1927-1945 |
| 890445.1 | 1690710.1 | | CUU | | 1690711.1 | | AA | |
| AD- | A- | 1224 | CAAAUAGCAGACUUGUU | 612-630 | A- | 1576 | GGAACAAGUCUGCUAUU | 612-630 |
| 890149.1 | 1690118.1 | | CC | | 1690119.1 | | UG | |
| AD- | A- | 1225 | UCCUUUCUGAGGCGUC | 676-694 | A- | 1577 | AGCGACGCCUCAGAAAG | 676-694 |
| 890168.1 | 1690156.1 | | GCU | | 1690157.1 | | GA | |
| AD- | A- | 1226 | UCCAUAGAUCUGGAUCU | 1609-1627 | A- | 1578 | CCAGAUCCAGAUCUAUG | 1609-1627 |
| 890376.1 | 1690572.1 | | GG | | 1690573.1 | | GA | |
| AD- | A- | 1227 | CAGGGACCAUCAAAGUG | 1000-1018 | A- | 1579 | CCCACUUUGAUGGUCCC | 1000-1018 |
| 890291.1 | 1690402.1 | | GG | | 1690403.1 | | UG | |
| AD- | A- | 1228 | CCAGGGACCAUCAAAGU | 999-1017 | A- | 1580 | CCACUUUGAUGGUCCCU | 999-1017 |
| 890290.1 | 1690400.1 | | GG | | 1690401.1 | | GG | |
| AD- | A- | 1229 | AGAAAGAGGAAGAGUG | 1409-1427 | A- | 1581 | ACCCACUCUUCCUCUUU | 1409-1427 |
| 890353.1 | 1690526.1 | | GGU | | 1690527.1 | | CU | |
| AD- | A- | 1230 | GCUGGAAACACUGAAGA | 902-920 | A- | 1582 | ACUCUUCAGUGUUUCCA | 902-920 |
| 890245.1 | 1690310.1 | | GU | | 1690311.1 | | GC | |
| AD- | A- | 1231 | AUGGAAGCUACUUUGA | 2001-2019 | A- | 1583 | UAGUCAAAGUAGCUUCC | 2001-2019 |
| 890468.1 | 1690756.1 | | CUA | | 1690757.1 | | AU | |
| AD- | A- | 1232 | AUUUUCCAUAGAUCUG | 1605-1623 | A- | 1584 | AUCCAGAUCUAUGGAAA | 1605-1623 |
| 890373.1 | 1690566.1 | | GAU | | 1690567.1 | | AU | |
| AD- | A- | 1233 | AUAGCAGACUUGUUCCG | 615-633 | A- | 1585 | GUCGGAACAAGUCUGCU | 615-633 |
| 890152.1 | 1690124.1 | | AC | | 1690125.1 | | AU | |
| AD- | A- | 1234 | CUCGCCUGGUCCUGAUU | 361-379 | A- | 1586 | GAAAUCAGGACCAGGCG | 361-379 |
| 890124.1 | 1690068.1 | | UC | | 1690069.1 | | AG | |
| AD- | A- | 1235 | ACUGAAGAGUUAUCGCC | 911-929 | A- | 1587 | CUGGCGAUAACUCUUCA | 911-929 |
| 890252.1 | 1690324.1 | | AG | | 1690325.1 | | GU | |
| AD- | A- | 1236 | GAAAACCUUUAAAGGG | 1822-1840 | A- | 1588 | UCCCCCUUUAAAGGUUU | 1822-1840 |
| 890420.1 | 1690660.1 | | GGA | | 1690661.1 | | UC | |
| AD- | A- | 1237 | CAGGAUGCGAUGUCUA | 763-781 | A- | 1589 | GCAUAGACAUCGCAUCC | 763-781 |
| 890199.1 | 1690218.1 | | UGC | | 1690219.1 | | UG | |
| AD- | A- | 1238 | AAAGUGAUUCAGUGAU | 1791-1809 | A- | 1590 | GAAAUCACUGAAUCACU | 1791-1809 |
| 890414.1 | 1690648.1 | | UUC | | 1690649.1 | | UU | |
| AD- | A- | 1239 | ACUGUGAAUAAAUGGA | 1990-2008 | A- | 1591 | GCUUCCAUUUAUUCACA | 1990-2008 |
| 890463.1 | 1690746.1 | | AGC | | 1690747.1 | | GU | |
| AD- | A- | 1240 | CUUGUGAUCAACCAGGA | 315-333 | A- | 1592 | CCUCCUGGUUGAUCACA | 315-333 |
| 890116.1 | 1690052.1 | | GG | | 1690053.1 | | AG | |
| AD- | A- | 1241 | ACUUGAAGCAUGGUGU | 1107-1125 | A- | 1593 | GAAACACCAUGCUUCAA | 1107-1125 |
| 890318.1 | 1690456.1 | | UUC | | 1690457.1 | | GU | |
| AD- | A- | 1242 | ACUUCAGGCCCAAUAUU | 739-757 | A- | 1594 | ACAAUAUUGGGCCUGAA | 739-757 |
| 890179.1 | 1690178.1 | | GU | | 1690179.1 | | GU | |
| AD- | A- | 1243 | GUGGAUAACCAGCUUCC | 533-551 | A- | 1595 | CAGGAAGCUGGUUAUCC | 533-551 |
| 890141.1 | 1690102.1 | | UG | | 1690103.1 | | AC | |
| AD- | A- | 1244 | GAGGUGACCUUCAGGA | 1573-1591 | A- | 1596 | GCUUCCUGAAGGUCACC | 1573-1591 |
| 890366.1 | 1690552.1 | | AGC | | 1690553.1 | | UC | |
| AD- | A- | 1245 | AAUGUUUUUAAAACUG | 1978-1996 | A- | 1597 | UCACAGUUUUAAAAACA | 1978-1996 |
| 890457.1 | 1690734.1 | | UGA | | 1690735.1 | | UU | |
| AD- | A- | 1246 | UAAUUUCAGGAUGCGA | 757-775 | A- | 1598 | ACAUCGCAUCCUGAAAU | 757-775 |
| 890195.1 | 1690210.1 | | UGU | | 1690211.1 | | UA | |
| AD- | A- | 1247 | UAAAUUUGUGAUUUUC | 1151-1169 | A- | 1599 | UGUGAAAAUCACAAAUU | 1151-1169 |
| 890326.1 | 1690472.1 | | ACA | | 1690473.1 | | UA | |
| AD- | A- | 1248 | GUUUAACUGAUUAUGG | 1305-1323 | A- | 1600 | AUUCCAUAAUCAGUUAA | 1305-1323 |
| 890339.1 | 1690498.1 | | AAU | | 1690499.1 | | AC | |
| AD- | A- | 1249 | GAUCCUUUCUGAGGCG | 674-692 | A- | 1601 | CGACGCCUCAGAAAGGA | 674-692 |
| 890166.1 | 1690152.1 | | UCG | | 1690153.1 | | UC | |
| AD- | A- | 1250 | UCUUUGGGCAGUAUUU | 970-988 | A- | 1602 | ACAAAAUACUGCCCAAA | 970-988 |
| 890280.1 | 1690380.1 | | UGU | | 1690381.1 | | GA | |
| AD- | A- | 1251 | UGACCCUUCAGAACGAA | 932-950 | A- | 1603 | CUUUCGUUCUGAAGGG | 932-950 |
| 890260.1 | 1690340.1 | | AG | | 1690341.1 | | UCA | |
| AD- | A- | 1252 | UAUUGCCAUUUUGUCC | 1928-1946 | A- | 1604 | AAAGGACAAAAUGGCAA | 1928-1946 |
| 890446.1 | 1690712.1 | | UUU | | 1690713.1 | | UA | |
| AD- | A- | 1253 | UUGUGCUGGAAAACCCA | 985-1003 | A- | 1605 | CCUGGGUUUUCCAGCAC | 985-1003 |
| 890287.1 | 1690394.1 | | GG | | 1690395.1 | | AA | |
| AD- | A- | 1254 | UAACUGAUUAUGGAAU | 1308-1326 | A- | 1606 | ACUAUUCCAUAAUCAGU | 1308-1326 |
| 890340.1 | 1690500.1 | | AGU | | 1690501.1 | | UA | |
| AD- | A- | 1255 | GAAUAGUUCUUUCUCC | 1320-1338 | A- | 1607 | GCAGGAGAAAGAACUAU | 1320-1338 |
| 890352.1 | 1690524.1 | | UGC | | 1690525.1 | | UC | |
| AD- | A- | 1256 | GGAGGGAAACAUGGUU | 329-347 | A- | 1608 | AGUAACCAUGUUUCCCU | 329-347 |
| 890123.1 | 1690066.1 | | ACU | | 1690067.1 | | CC | |
| AD- | A- | 1257 | CCCGGGCUAGCUUUUGA | 1541-1559 | A- | 1609 | UUUCAAAAGCUAGCCCG | 1541-1559 |
| 890357.1 | 1690534.1 | | AA | | 1690535.1 | | GG | |
| AD- | A- | 1258 | UGGAAUAGUUCUUUCU | 1318-1336 | A- | 1610 | AGGAGAAAGAACUAUUC | 1318-1336 |
| 890350.1 | 1690520.1 | | CCU | | 1690521.1 | | CA | |
| AD- | A- | 1259 | AUUGGAUUUCCUAAAG | 1649-1667 | A- | 1611 | CACCUUUAGGAAAUCCA | 1649-1667 |
| 890390.1 | 1690600.1 | | GUG | | 1690601.1 | | AU | |
| AD- | A- | 1260 | UGACUAAACUUGAAAAA | 1963-1981 | A- | 1612 | CAUUUUUCAAGUUUAG | 1963-1981 |
| 890452.1 | 1690724.1 | | UG | | 1690725.1 | | UCA | |
| AD- | A- | 1261 | CGCCCACCACAAAUGCA | 451-469 | A- | 1613 | ACUGCAUUUGUGGUGG | 451-469 |
| 890139.1 | 1690098.1 | | GU | | 1690099.1 | | GCG | |
| AD- | A- | 1262 | CCUGAUUUCCCUGACCU | 371-389 | A- | 1614 | GCAGGUCAGGGAAAUCA | 371-389 |
| 890129.1 | 1690078.1 | | GC | | 1690079.1 | | GG | |
| AD- | A- | 1263 | UGAAGCAUGGUGUUUC | 1110-1128 | A- | 1615 | UCUGAAACACCAUGCUU | 1110-1128 |
| 890320.1 | 1690460.1 | | AGA | | 1690461.1 | | CA | |
| AD- | A- | 1264 | AGCAGACUUGUUCCGAC | 617-635 | A- | 1616 | GGGUCGGAACAAGUCUG | 617-635 |
| 890154.1 | 1690128.1 | | CC | | 1690129.1 | | CU | |
| AD- | A- | 1265 | GGAUUUGACUUCUUUU | | A- | 1617 | UAAAAAAGAAGUCAAAU | |
| 890213.1 | 1690246.1 | | UUA | | 1690247.1 | | CC | |
| AD- | A- | 1266 | GAUGGCUUGUUCCAGA | 833-851 | A- | 1618 | GCAUCUGGAACAAGCCA | 833-851 |
| 890234.1 | 1690288.1 | | UGC | | 1690289.1 | | UC | |
| AD- | A- | 1267 | CAGAACGAAAGUUAUAU | 940-958 | A- | 1619 | CCAUAUAACUUUCGUUC | 940-958 |
| 890266.1 | 1690352.1 | | GG | | 1690353.1 | | UG | |
| AD- | A- | 1268 | UUAUGGAAUAGUUCUU | 1315-1333 | A- | 1620 | AGAAAGAACUAUUCCAU | 1315-1333 |
| 890347.1 | 1690514.1 | | UCU | | 1690515.1 | | AA | |
| AD- | A- | 1269 | AUGGUGUUUCAGAACU | 1116-1134 | A- | 1621 | CUCAGUUCUGAAACACC | 1116-1134 |
| 890321.1 | 1690462.1 | | GAG | | 1690463.1 | | AU | |
| AD- | A- | 1270 | UCCUGGAAUAUUAGAU | 1060-1078 | A- | 1622 | GGCAUCUAAUAUUCCAG | 1060-1078 |
| 890305.1 | 1690430.1 | | GCC | | 1690431.1 | | GA | |
| AD- | A- | 1271 | AGGACCAGAUUGCUUAC | 637-655 | A- | 1623 | GAGUAAGCAAUCUGGUC | 637-655 |
| 890160.1 | 1690140.1 | | UC | | 1690141.1 | | CU | |
| AD- | A- | 1272 | UGGUGACACCCUGACUC | 392-410 | A- | 1624 | GAGAGUCAGGGUGUCAC | 392-410 |
| 890130.1 | 1690080.1 | | UC | | 1690081.1 | | CA | |
| AD- | A- | 1273 | AUUUGACUUCUUUUUU | | A- | 1625 | CUUAAAAAAGAAGUCAA | |
| 890215.1 | 1690250.1 | | AAG | | 1690251.1 | | AU | |
| AD- | A- | 1274 | CUUCAGGCCCAAUAUUG | 740-758 | A- | 1626 | UACAAUAUUGGGCCUGA | 740-758 |
| 890180.1 | 1690180.1 | | UA | | 1690181.1 | | AG | |
| AD- | A- | 1275 | UGGAAGCUACUUUGAC | 2002-2020 | A- | 1627 | CUAGUCAAAGUAGCUUC | 2002-2020 |
| 890469.1 | 1690758.1 | | UAG | | 1690759.1 | | CA | |
| AD- | A- | 1276 | UAACCAGCUUCCUGAAG | 538-556 | A- | 1628 | GACUUCAGGAAGCUGG | 538-556 |
| 890143.1 | 1690106.1 | | UC | | 1690107.1 | | UUA | |
| AD- | A- | 1277 | AAAAAUGUUCUCAAAAA | 1083-1101 | A- | 1629 | CAUUUUUGAGAACAUU | 1083-1101 |
| 890306.1 | 1690432.1 | | UG | | 1690433.1 | | UUU | |
| AD- | A- | 1278 | UAGCAGACUUGUUCCGA | 616-634 | A- | 1630 | GGUCGGAACAAGUCUGC | 616-634 |
| 890153.1 | 1690126.1 | | CC | | 1690127.1 | | UA | |
| AD- | A- | 1279 | UUCCCCUCAGCUAAUGA | 1716-1734 | A- | 1631 | CGUCAUUAGCUGAGGG | 1716-1734 |
| 890403.1 | 1690626.1 | | CG | | 1690627.1 | | GAA | |
| AD- | A- | 1280 | UGGGCAGUAUUUUGUG | 974-992 | A- | 1632 | CAGCACAAAAUACUGCC | 974-992 |
| 890284.1 | 1690388.1 | | CUG | | 1690389.1 | | CA | |
| AD- | A- | 1281 | ACCCAAGGACCAGAUUG | 632-650 | A- | 1633 | AGCAAUCUGGUCCUUGG | 632-650 |
| 890157.1 | 1690134.1 | | CU | | 1690135.1 | | GU | |
| AD- | A- | 1282 | GGAAGCUACUUUGACU | 2003-2021 | A- | 1634 | ACUAGUCAAAGUAGCUU | 2003-2021 |
| 890470.1 | 1690760.1 | | AGU | | 1690761.1 | | CC | |
| AD- | A- | 1283 | CCCAAUAUUGUAAUUUC | 747-765 | A- | 1635 | CUGAAAUUACAAUAUUG | 747-765 |
| 890187.1 | 1690194.1 | | AG | | 1690195.1 | | GG | |
| AD- | A- | 1284 | CUUUGGGCAGUAUUUU | 971-989 | A- | 1636 | CACAAAAUACUGCCCAA | 971-989 |
| 890281.1 | 1690382.1 | | GUG | | 1690383.1 | | AG | |
| AD- | A- | 1285 | UUGUUUAAAACCCAAUA | 1860-1878 | A- | 1637 | GAUAUUGGGUUUUAAA | 1860-1878 |
| 890425.1 | 1690670.1 | | UC | | 1690671.1 | | CAA | |
| AD- | A- | 1286 | CCUGGUCCUGAUUUCCC | 365-383 | A- | 1638 | CAGGGAAAUCAGGACCA | 365-383 |
| 890127.1 | 1690074.1 | | UG | | 1690075.1 | | GG | |
| AD- | A- | 1287 | UUCCAGAUGCAUUUUA | 842-860 | A- | 1639 | GGUUAAAAUGCAUCUG | 842-860 |
| 890238.1 | 1690296.1 | | ACC | | 1690297.1 | | GAA | |
| AD- | A- | 1288 | AAAUGACAACACUUGAA | 1097-1115 | A- | 1640 | GCUUCAAGUGUUGUCA | 1097-1115 |
| 890311.1 | 1690442.1 | | GC | | 1690443.1 | | UUU | |
| AD- | A- | 1289 | CCAAAUAUGGCUGGAAU | 1500-1518 | A- | 1641 | GCAUUCCAGCCAUAUUU | 1500-1518 |
| 890355.1 | 1690530.1 | | GC | | 1690531.1 | | GG | |
| AD- | A- | 1290 | CUCAAUGCUUCAAUGUC | 1196-1214 | A- | 1642 | GGGACAUUGAAGCAUU | 1196-1214 |
| 890334.1 | 1690488.1 | | CC | | 1690489.1 | | GAG | |
| AD- | A- | 1291 | ACCAGCUUCCUGAAGUC | 540-558 | A- | 1643 | GUGACUUCAGGAAGCU | 540-558 |
| 890144.1 | 1690108.1 | | AC | | 1690109.1 | | GGU | |
| AD- | A- | 1292 | CCUUGGAUUUGACUUC | | A- | 1644 | AAAGAAGUCAAAUCCAA | |
| 890209.1 | 1690238.1 | | UUU | | 1690239.1 | | GG | |
| AD- | A- | 1293 | UUCCAUAGAUCUGGAUC | 1608-1626 | A- | 1645 | CAGAUCCAGAUCUAUGG | 1608-1626 |
| 890375.1 | 1690570.1 | | UG | | 1690571.1 | | AA | |
| AD- | A- | 1294 | AACUUCAGGCCCAAUAU | 738-756 | A- | 1646 | CAAUAUUGGGCCUGAAG | 738-756 |
| 890178.1 | 1690176.1 | | UG | | 1690177.1 | | UU | |
| AD- | A- | 1295 | AAGAGUUAUCGCCAGU | 915-933 | A- | 1647 | CACACUGGCGAUAACUC | 915-933 |
| 890254.1 | 1690328.1 | | GUG | | 1690329.1 | | UU | |
| AD- | A- | 1296 | UCAGGAUGCGAUGUCU | 762-780 | A- | 1648 | CAUAGACAUCGCAUCCU | 762-780 |
| 890198.1 | 1690216.1 | | AUG | | 1690217.1 | | GA | |
| AD- | A- | 1297 | UCCAGAUGCAUUUUAAC | 843-861 | A- | 1649 | UGGUUAAAAUGCAUCU | 843-861 |
| 890239.1 | 1690298.1 | | CA | | 1690299.1 | | GGA | |
| AD- | A- | 1298 | ACUGAGGUGACCUUCAG | 1570-1588 | A- | 1650 | UCCUGAAGGUCACCUCA | 1570-1588 |
| 890364.1 | 1690548.1 | | GA | | 1690549.1 | | GU | |
| AD- | A- | 1299 | GAUUUGACUUCUUUUU | | A- | 1651 | UUAAAAAAGAAGUCAAA | |
| 890214.1 | 1690248.1 | | UAA | | 1690249.1 | | UC | |
| AD- | A- | 1300 | CUGGUCCUGAUUUCCCU | 366-384 | A- | 1652 | UCAGGGAAAUCAGGACC | 366-384 |
| 890128.1 | 1690076.1 | | GA | | 1690077.1 | | AG | |
| AD- | A- | 1301 | ACACUGAAGAGUUAUCG | 909-927 | A- | 1653 | GGCGAUAACUCUUCAGU | 909-927 |
| 890250.1 | 1690320.1 | | CC | | 1690321.1 | | GU | |
| AD- | A- | 1302 | AAAUCACCACUCUUUGG | 960-978 | A- | 1654 | GCCCAAAGAGUGGUGAU | 960-978 |
| 890274.1 | 1690368.1 | | GC | | 1690369.1 | | UU | |
| AD- | A- | 1303 | ACCCAGGGACCAUCAAA | 997-1015 | A- | 1655 | ACUUUGAUGGUCCCUG | 997-1015 |
| 890288.1 | 1690396.1 | | GU | | 1690397.1 | | GGU | |
| AD- | A- | 1304 | CCCAGGGACCAUCAAAG | 998-1016 | A- | 1656 | CACUUUGAUGGUCCCUG | 998-1016 |
| 890289.1 | 1690398.1 | | UG | | 1690399.1 | | GG | |
| AD- | A- | 1305 | UGACAACACUUGAAGCA | 1100-1118 | A- | 1657 | CAUGCUUCAAGUGUUG | 1100-1118 |
| 890312.1 | 1690444.1 | | UG | | 1690445.1 | | UCA | |
| AD- | A- | 1306 | UUCUUAUUGGUGACGU | 802-820 | A- | 1658 | UCCACGUCACCAAUAAG | 802-820 |
| 890230.1 | 1690280.1 | | GGA | | 1690281.1 | | AA | |
| AD- | A- | 1307 | CACUUCGAGCCUCACAU | 576-594 | A- | 1659 | GCAUGUGAGGCUCGAAG | 576-594 |
| 890146.1 | 1690112.1 | | GC | | 1690113.1 | | UG | |
| AD- | A- | 1308 | CUUCUUAUUGGUGACG | 801-819 | A- | 1660 | CCACGUCACCAAUAAGA | 801-819 |
| 890229.1 | 1690278.1 | | UGG | | 1690279.1 | | AG | |
| AD- | A- | 1309 | AUGGAAUAGUUCUUUC | 1317-1335 | A- | 1661 | GGAGAAAGAACUAUUCC | 1317-1335 |
| 890349.1 | 1690518.1 | | UCC | | 1690519.1 | | AU | |
| AD- | A- | 1310 | AAAAUCACCACUCUUUG | 959-977 | A- | 1662 | CCCAAAGAGUGGUGAUU | 959-977 |
| 890273.1 | 1690366.1 | | GG | | 1690367.1 | | UU | |
| AD- | A- | 1311 | CUUGGAUUUGACUUCU | | A- | 1663 | AAAAGAAGUCAAAUCCA | |
| 890210.1 | 1690240.1 | | UUU | | 1690241.1 | | AG | |
| AD- | A- | 1312 | UGUCCUGGAAUAUUAG | 1058-1076 | A- | 1664 | CAUCUAAUAUUCCAGGA | 1058-1076 |
| 890303.1 | 1690426.1 | | AUG | | 1690427.1 | | CA | |
| AD- | A- | 1313 | AGGAGGGAAACAUGGU | 328-346 | A- | 1665 | GUAACCAUGUUUCCCUC | 328-346 |
| 890122.1 | 1690064.1 | | UAC | | 1690065.1 | | CU | |
| AD- | A- | 1314 | AAGCAACCAACUUCAGG | 730-748 | A- | 1666 | GGCCUGAAGUUGGUUG | 730-748 |
| 890176.1 | 1690172.1 | | CC | | 1690173.1 | | CUU | |
| AD- | A- | 1315 | AUGUCAGUUGUUUAAA | 1853-1871 | A- | 1667 | GGUUUUAAACAACUGAC | 1853-1871 |
| 890423.1 | 1690666.1 | | ACC | | 1690667.1 | | AU | |
| AD- | A- | 1316 | UAUGUCAGUUGUUUAA | 1852-1870 | A- | 1668 | GUUUUAAACAACUGACA | 1852-1870 |
| 890422.1 | 1690664.1 | | AAC | | 1690665.1 | | UA | |
| AD- | A- | 1317 | AAUUUCAGGAUGCGAU | 758-776 | A- | 1669 | GACAUCGCAUCCUGAAA | 758-776 |
| 890196.1 | 1690212.1 | | GUC | | 1690213.1 | | UU | |
| AD- | A- | 1318 | UUCAGGCCCAAUAUUGU | 741-759 | A- | 1670 | UUACAAUAUUGGGCCU | 741-759 |
| 890181.1 | 1690182.1 | | AA | | 1690183.1 | | GAA | |
| AD- | A- | 1319 | UCAGACAGCAUUGGAU | 1640-1658 | A- | 1671 | GAAAUCCAAUGCUGUCU | 1640-1658 |
| 890384.1 | 1690588.1 | | UUC | | 1690589.1 | | GA | |
| AD- | A- | 1320 | AAGCUACUUUGACUAG | 2005-2023 | A- | 1672 | AAACUAGUCAAAGUAGC | 2005-2023 |
| 890471.1 | 1690762.1 | | UUU | | 1690763.1 | | UU | |
| AD- | A- | 1321 | GGGACCAUCAAAGUGG | 1002-1020 | A- | 1673 | CUCCCACUUUGAUGGUC | 1002-1020 |
| 890293.1 | 1690406.1 | | GAG | | 1690407.1 | | CC | |
| AD- | A- | 1322 | UGACACCCUGACUCUCA | 395-413 | A- | 1674 | ACUGAGAGUCAGGGUG | 395-413 |
| 890131.1 | 1690082.1 | | GU | | 1690083.1 | | UCA | |
| AD- | A- | 1323 | CAAUAUUGUAAUUUCA | 749-767 | A- | 1675 | UCCUGAAAUUACAAUAU | 749-767 |
| 890189.1 | 1690198.1 | | GGA | | 1690199.1 | | UG | |
| AD- | A- | 1324 | AAAGCAACCAACUUCAG | 729-747 | A- | 1676 | GCCUGAAGUUGGUUGC | 729-747 |
| 890175.1 | 1690170.1 | | GC | | 1690171.1 | | UUU | |
| AD- | A- | 1325 | UGCUUACUCAGACACCA | 647-665 | A- | 1677 | GCUGGUGUCUGAGUAA | 647-665 |
| 890164.1 | 1690148.1 | | GC | | 1690149.1 | | GCA | |
| AD- | A- | 1326 | AGGCCCAAUAUUGUAAU | 744-762 | A- | 1678 | AAAUUACAAUAUUGGGC | 744-762 |
| 890184.1 | 1690188.1 | | UU | | 1690189.1 | | CU | |
| AD- | A- | 1327 | UCUUUCCUUGGAUUUG | | A- | 1679 | AGUCAAAUCCAAGGAAA | |
| 890206.1 | 1690232.1 | | ACU | | 1690233.1 | | GA | |
| AD- | A- | 1328 | UGGGCCAGUAAUGGGA | 1036-1054 | A- | 1680 | GGUUCCCAUUACUGGCC | 1036-1054 |
| 890299.1 | 1690418.1 | | ACC | | 1690419.1 | | CA | |
| AD- | A- | 1329 | AGCAACCAACUUCAGGC | 731-749 | A- | 1681 | GGGCCUGAAGUUGGUU | 731-749 |
| 890177.1 | 1690174.1 | | CC | | 1690175.1 | | GCU | |
| AD- | A- | 1330 | UUUUUUAAGGAUUCUU | | A- | 1682 | CCCAAGAAUCCUUAAAA | |
| 890223.1 | 1690266.1 | | GGG | | 1690267.1 | | AA | |
| AD- | A- | 1331 | UGGAUUUGACUUCUUU | | A- | 1683 | AAAAAAGAAGUCAAAUC | |
| 890212.1 | 1690244.1 | | UUU | | 1690245.1 | | CA | |
| AD- | A- | 1332 | AGGGACCAUCAAAGUGG | 1001-1019 | A- | 1684 | UCCCACUUUGAUGGUCC | 1001-1019 |
| 890292.1 | 1690404.1 | | GA | | 1690405.1 | | CU | |
| AD- | A- | 1333 | GACACCCUGACUCUCAG | 396-414 | A- | 1685 | CACUGAGAGUCAGGGUG | 396-414 |
| 890132.1 | 1690084.1 | | UG | | 1690085.1 | | UC | |
| AD- | A- | 1334 | ACGCCCACCACAAAUGC | 450-468 | A- | 1686 | CUGCAUUUGUGGUGGG | 450-468 |
| 890138.1 | 1690096.1 | | AG | | 1690097.1 | | CGU | |
| AD- | A- | 1335 | UUUUUUAUUGCCAUUU | 1923-1941 | A- | 1687 | ACAAAAUGGCAAUAAAA | 1923-1941 |
| 890441.1 | 1690702.1 | | UGU | | 1690703.1 | | AA | |
| AD- | A- | 1336 | UUUCCUAAAGGUGCUCA | 1655-1673 | A- | 1688 | CCUGAGCACCUUUAGGA | 1655-1673 |
| 890394.1 | 1690608.1 | | GG | | 1690609.1 | | AA | |
| AD- | A- | 1337 | UUAAAACUGUGAAUAA | 1985-2003 | A- | 1689 | CAUUUAUUCACAGUUU | 1985-2003 |
| 890458.1 | 1690736.1 | | AUG | | 1690737.1 | | UAA | |
| AD- | A- | 1338 | AUCUUUCCUUGGAUUU | | A- | 1690 | GUCAAAUCCAAGGAAAG | |
| 890205.1 | 1690230.1 | | GAC | | 1690231.1 | | AU | |
| AD- | A- | 1339 | AUCACCACUCUUUGGGC | 962-980 | A- | 1691 | CUGCCCAAAGAGUGGUG | 962-980 |
| 890276.1 | 1690372.1 | | AG | | 1690373.1 | | AU | |
| AD- | A- | 1340 | UGGAUCCUUGCCAUUCC | 1703-1721 | A- | 1692 | GGGGAAUGGCAAGGAU | 1703-1721 |
| 890398.1 | 1690616.1 | | CC | | 1690617.1 | | CCA | |
| AD- | A- | 1341 | UGAGGUGACCUUCAGG | 1572-1590 | A- | 1693 | CUUCCUGAAGGUCACCU | 1572-1590 |
| 890365.1 | 1690550.1 | | AAG | | 1690551.1 | | CA | |
| AD- | A- | 1342 | AGCUUCUUAUUGGUGA | 799-817 | A- | 1694 | ACGUCACCAAUAAGAAG | 799-817 |
| 890227.1 | 1690274.1 | | CGU | | 1690275.1 | | CU | |
| AD- | A- | 1343 | ACACCCUGACUCUCAGU | 397-415 | A- | 1695 | GCACUGAGAGUCAGGGU | 397-415 |
| 890133.1 | 1690086.1 | | GC | | 1690087.1 | | GU | |
| AD- | A- | 1344 | UUGGAUUUGACUUCUU | | A- | 1696 | AAAAAGAAGUCAAAUCC | |
| 890211.1 | 1690242.1 | | UUU | | 1690243.1 | | AA | |
| AD- | A- | 1345 | AUUUUGUGCUGGAAAA | 982-1000 | A- | 1697 | GGGUUUUCCAGCACAAA | 982-1000 |
| 890286.1 | 1690392.1 | | CCC | | 1690393.1 | | AU | |
| AD- | A- | 1346 | GAAGUAUAUUUUUUAU | 1915-1933 | A- | 1698 | GCAAUAAAAAAUAUACU | 1915-1933 |
| 890437.1 | 1690694.1 | | UGC | | 1690695.1 | | UC | |
| AD- | A- | 1347 | UACUGAAAACCUUUAAA | 1818-1836 | A- | 1699 | CCUUUAAAGGUUUUCA | 1818-1836 |
| 890416.1 | 1690652.1 | | GG | | 1690653.1 | | GUA | |
| AD- | A- | 1348 | AAUAGCAGACUUGUUCC | 614-632 | A- | 1700 | UCGGAACAAGUCUGCUA | 614-632 |
| 890151.1 | 1690122.1 | | GA | | 1690123.1 | | UU | |
| AD- | A- | 1349 | AUUUUUUAUUGCCAUU | 1922-1940 | A- | 1701 | CAAAAUGGCAAUAAAAA | 1922-1940 |
| 890440.1 | 1690700.1 | | UUG | | 1690701.1 | | AU | |
| AD- | A- | 1350 | UUGGGCAGUAUUUUGU | 973-991 | A- | 1702 | AGCACAAAAUACUGCCC | 973-991 |
| 890283.1 | 1690386.1 | | GCU | | 1690387.1 | | AA | |
| AD- | A- | 1351 | UCUCAAUGCUUCAAUG | 1195-1213 | A- | 1703 | GGACAUUGAAGCAUUGA | 1195-1213 |
| 890333.1 | 1690486.1 | | UCC | | 1690487.1 | | GA | |
| AD- | A- | 1352 | UUAAAUUUGUGAUUUU | 1150-1168 | A- | 1704 | GUGAAAAUCACAAAUUU | 1150-1168 |
| 890325.1 | 1690470.1 | | CAC | | 1690471.1 | | AA | |
| AD- | A- | 1353 | UCAGAACGAAAGUUAUA | 939-957 | A- | 1705 | CAUAUAACUUUCGUUCU | 939-957 |
| 890265.1 | 1690350.1 | | UG | | 1690351.1 | | GA | |
| AD- | A- | 1354 | UUUAUUGCCAUUUUGU | 1926-1944 | A- | 1706 | AGGACAAAAUGGCAAUA | 1926-1944 |
| 890444.1 | 1690708.1 | | CCU | | 1690709.1 | | AA | |
| AD- | A- | 1355 | UUUGGGCAGUAUUUUG | 972-990 | A- | 1707 | GCACAAAAUACUGCCCA | 972-990 |
| 890282.1 | 1690384.1 | | UGC | | 1690385.1 | | AA | |
| AD- | A- | 1356 | AAAUGUUUUUAAAACU | 1977-1995 | A- | 1708 | CACAGUUUUAAAAACAU | 1977-1995 |
| 890456.1 | 1690732.1 | | GUG | | 1690733.1 | | UU | |
| AD- | A- | 1357 | ACUGAAAACCUUUAAAG | 1819-1837 | A- | 1709 | CCCUUUAAAGGUUUUCA | 1819-1837 |
| 890417.1 | 1690654.1 | | GG | | 1690655.1 | | GU | |
| AD- | A- | 1358 | UUGUGAUCAACCAGGA | 316-334 | A- | 1710 | CCCUCCUGGUUGAUCAC | 316-334 |
| 890117.1 | 1690054.1 | | GGG | | 1690055.1 | | AA | |
| AD- | A- | 1359 | CAUUUUCUUUAAAUUU | 1142-1160 | A- | 1711 | CACAAAUUUAAAGAAAA | 1142-1160 |
| 890323.1 | 1690466.1 | | GUG | | 1690467.1 | | UG | |
| AD- | A- | 1360 | CUUUUUUAAGGAUUCU | | A- | 1712 | CCAAGAAUCCUUAAAAA | |
| 890222.1 | 1690264.1 | | UGG | | 1690265.1 | | AG | |
| AD- | A- | 1361 | AAACGCCCACCACAAAU | 448-466 | A- | 1713 | GCAUUUGUGGUGGGCG | 448-466 |
| 890136.1 | 1690092.1 | | GC | | 1690093.1 | | UUU | |
| AD- | A- | 1362 | AAAUAGCAGACUUGUUC | 613-631 | A- | 1714 | CGGAACAAGUCUGCUAU | 613-631 |
| 890150.1 | 1690120.1 | | CG | | 1690121.1 | | UU | |
| AD- | A- | 1363 | GAGCUUCUUAUUGGUG | 798-816 | A- | 1715 | CGUCACCAAUAAGAAGC | 798-816 |
| 890226.1 | 1690272.1 | | ACG | | 1690273.1 | | UC | |
| AD- | A- | 1364 | CAGAUAUUAAUUUUCC | 1596-1614 | A- | 1716 | UAUGGAAAAUUAAUAU | 1596-1614 |
| 890367.1 | 1690554.1 | | AUA | | 1690555.1 | | CUG | |
| AD- | A- | 1365 | UAUUGUAAUUUCAGGA | 752-770 | A- | 1717 | GCAUCCUGAAAUUACAA | 752-770 |
| 890191.1 | 1690202.1 | | UGC | | 1690203.1 | | UA | |
| AD- | A- | 1366 | UGUGAUUUUCACAUUU | 1157-1175 | A- | 1718 | GAAAAAUGUGAAAAUCA | 1157-1175 |
| 890328.1 | 1690476.1 | | UUC | | 1690477.1 | | CA | |
| AD- | A- | 1367 | UGACGUGGAACUGAAA | 812-830 | A- | 1719 | CCUUUUCAGUUCCACGU | 812-830 |
| 890232.1 | 1690284.1 | | AGG | | 1690285.1 | | CA | |
| AD- | A- | 1368 | GAAAGAGGAAGAGUGG | 1410-1428 | A- | 1720 | CACCCACUCUUCCUCUU | 1410-1428 |
| 890354.1 | 1690528.1 | | GUG | | 1690529.1 | | UC | |
| AD- | A- | 1369 | UUUCCUUGGAUUUGAC | | A- | 1721 | GAAGUCAAAUCCAAGGA | |
| 890208.1 | 1690236.1 | | UUC | | 1690237.1 | | AA | |
| AD- | A- | 1370 | UGAUCCUUUCUGAGGC | 673-691 | A- | 1722 | GACGCCUCAGAAAGGAU | 673-691 |
| 890165.1 | 1690150.1 | | GUC | | 1690151.1 | | CA | |
| AD- | A- | 1371 | AUGUCUAUGCAGAGGU | 772-790 | A- | 1723 | GUUACCUCUGCAUAGAC | 772-790 |
| 890204.1 | 1690228.1 | | AAC | | 1690229.1 | | AU | |
| AD- | A- | 1372 | UCAGGCCCAAUAUUGUA | 742-760 | A- | 1724 | AUUACAAUAUUGGGCCU | 742-760 |
| 890182.1 | 1690184.1 | | AU | | 1690185.1 | | GA | |
| AD- | A- | 1373 | CUUUAAAUUUGUGAUU | 1148-1166 | A- | 1725 | GAAAAUCACAAAUUUAA | 1148-1166 |
| 890324.1 | 1690468.1 | | UUC | | 1690469.1 | | AG | |
| AD- | A- | 1374 | ACUUCUUUUUUAAGGA | | A- | 1726 | GAAUCCUUAAAAAAGAA | |
| 890220.1 | 1690260.1 | | UUC | | 1690261.1 | | GU | |
| AD- | A- | 1375 | UUCGAGCCUCACAUGCG | 579-597 | A- | 1727 | GUCGCAUGUGAGGCUC | 579-597 |
| 890148.1 | 1690116.1 | | AC | | 1690117.1 | | GAA | |
| AD- | A- | 1376 | UUUUCCAUAGAUCUGG | 1606-1624 | A- | 1728 | GAUCCAGAUCUAUGGAA | 1606-1624 |
| 890374.1 | 1690568.1 | | AUC | | 1690569.1 | | AA | |
| AD- | A- | 1377 | UAUGGAAUAGUUCUUU | 1316-1334 | A- | 1729 | GAGAAAGAACUAUUCCA | 1316-1334 |
| 890348.1 | 1690516.1 | | CUC | | 1690517.1 | | UA | |
| AD- | A- | 1378 | GACGUGGAACUGAAAAG | 813-831 | A- | 1730 | CCCUUUUCAGUUCCACG | 813-831 |
| 890233.1 | 1690286.1 | | GG | | 1690287.1 | | UC | |
| AD- | A- | 1379 | AUUAAUUUUCCAUAGA | 1601-1619 | A- | 1731 | AGAUCUAUGGAAAAUUA | 1601-1619 |
| 890369.1 | 1690558.1 | | UCU | | 1690559.1 | | AU | |
| AD- | A- | 1380 | UGCAGCCUACACAAAGG | 413-431 | A- | 1732 | GUCCUUUGUGUAGGCU | 413-431 |
| 890135.1 | 1690090.1 | | AC | | 1690091.1 | | GCA | |
| AD- | A- | 1381 | AACCAGGAGGGAAACAU | 324-342 | A- | 1733 | CCAUGUUUCCCUCCUGG | 324-342 |
| 890119.1 | 1690058.1 | | GG | | 1690059.1 | | UU | |
| AD- | A- | 1382 | UAAUUUUCCAUAGAUC | 1603-1621 | A- | 1734 | CCAGAUCUAUGGAAAAU | 1603-1621 |
| 890371.1 | 1690562.1 | | UGG | | 1690563.1 | | UA | |
| AD- | A- | 1383 | UGUCAGUUGUUUAAAA | 1854-1872 | A- | 1735 | GGGUUUUAAACAACUG | 1854-1872 |
| 890424.1 | 1690668.1 | | CCC | | 1690669.1 | | ACA | |
| AD- | A- | 1384 | UUGAAGCAUGGUGUUU | 1109-1127 | A- | 1736 | CUGAAACACCAUGCUUC | 1109-1127 |
| 890319.1 | 1690458.1 | | CAG | | 1690459.1 | | AA | |
| AD- | A- | 1385 | UCGCCUGGUCCUGAUU | 362-380 | A- | 1737 | GGAAAUCAGGACCAGGC | 362-380 |
| 890125.1 | 1690070.1 | | UCC | | 1690071.1 | | GA | |
| AD- | A- | 1386 | UAAAACUGUGAAUAAA | 1986-2004 | A- | 1738 | CCAUUUAUUCACAGUUU | 1986-2004 |
| 890459.1 | 1690738.1 | | UGG | | 1690739.1 | | UA | |
| AD- | A- | 1387 | UUGGAUUUCCUAAAGG | 1650-1668 | A- | 1739 | GCACCUUUAGGAAAUCC | 1650-1668 |
| 890391.1 | 1690602.1 | | UGC | | 1690603.1 | | AA | |
| AD- | A- | 1388 | AAGUAUAUUUUUUAUU | 1916-1934 | A- | 1740 | GGCAAUAAAAAAUAUAC | 1916-1934 |
| 890438.1 | 1690696.1 | | GCC | | 1690697.1 | | UU | |
| AD- | A- | 1389 | UAUUAAUUUUCCAUAG | 1600-1618 | A- | 1741 | GAUCUAUGGAAAAUUAA | 1600-1618 |
| 890368.1 | 1690556.1 | | AUC | | 1690557.1 | | UA | |
| AD- | A- | 1390 | AUAUUGUAAUUUCAGG | 751-769 | A- | 1742 | CAUCCUGAAAUUACAAU | 751-769 |
| 890190.1 | 1690200.1 | | AUG | | 1690201.1 | | AU | |
| AD- | A- | 1391 | AUCCUUUCUGAGGCGU | 675-693 | A- | 1743 | GCGACGCCUCAGAAAGG | 675-693 |
| 890167.1 | 1690154.1 | | CGC | | 1690155.1 | | AU | |
| AD- | A- | 1392 | UUUUUAUUGCCAUUUU | 1924-1942 | A- | 1744 | GACAAAAUGGCAAUAAA | 1924-1942 |
| 890442.1 | 1690704.1 | | GUC | | 1690705.1 | | AA | |
| AD- | A- | 1393 | UAGAGAAGAAAGUUAA | 715-733 | A- | 1745 | GCUUUAACUUUCUUCUC | 715-733 |
| 890170.1 | 1690160.1 | | AGC | | 1690161.1 | | UA | |
| AD- | A- | 1394 | UUUGACUUCUUUUUUA | | A- | 1746 | CCUUAAAAAAGAAGUCA | |
| 890216.1 | 1690252.1 | | AGG | | 1690253.1 | | AA | |
| AD- | A- | 1395 | GCCCACCACAAAUGCAG | 452-470 | A- | 1747 | CACUGCAUUUGUGGUG | 452-470 |
| 890140.1 | 1690100.1 | | UG | | 1690101.1 | | GGC | |
| AD- | A- | 1396 | UAAAGCAACCAACUUCA | 728-746 | A- | 1748 | CCUGAAGUUGGUUGCU | 728-746 |
| 890174.1 | 1690168.1 | | GG | | 1690169.1 | | UUA | |
| AD- | A- | 1397 | UUAAAGCAACCAACUUC | 727-745 | A- | 1749 | CUGAAGUUGGUUGCUU | 727-745 |
| 890173.1 | 1690166.1 | | AG | | 1690167.1 | | UAA | |
| AD- | A- | 1398 | UUGUUCCGACCCAAGGA | 624-642 | A- | 1750 | GGUCCUUGGGUCGGAA | 624-642 |
| 890155.1 | 1690130.1 | | CC | | 1690131.1 | | CAA | |
| AD- | A- | 1399 | UUAAUUUUCCAUAGAU | 1602-1620 | A- | 1751 | CAGAUCUAUGGAAAAUU | 1602-1620 |
| 890370.1 | 1690560.1 | | CUG | | 1690561.1 | | AA | |
| AD- | A- | 1400 | AACACUGAAGAGUUAUC | 908-926 | A- | 1752 | GCGAUAACUCUUCAGUG | 908-926 |
| 890249.1 | 1690318.1 | | GC | | 1690319.1 | | UU | |
| AD- | A- | 1401 | GACUUCUUUUUUAAGG | | A- | 1753 | AAUCCUUAAAAAAGAAG | |
| 890219.1 | 1690258.1 | | AUU | | 1690259.1 | | UC | |
| AD- | A- | 1402 | UGACUUCUUUUUUAAG | | A- | 1754 | AUCCUUAAAAAAGAAGU | |
| 890218.1 | 1690256.1 | | GAU | | 1690257.1 | | CA | |
| AD- | A- | 1403 | UUGACUUCUUUUUUAA | | A- | 1755 | UCCUUAAAAAAGAAGUC | |
| 890217.1 | 1690254.1 | | GGA | | 1690255.1 | | AA | |
| AD- | A- | 1404 | AAACACUGAAGAGUUAU | 907-925 | A- | 1756 | CGAUAACUCUUCAGUGU | 907-925 |
| 890248.1 | 1690316.1 | | CG | | 1690317.1 | | UU | |
| AD- | A- | 1405 | AUUAUGGAAUAGUUCU | 1314-1332 | A- | 1757 | GAAAGAACUAUUCCAUA | 1314-1332 |
| 890346.1 | 1690512.1 | | UUC | | 1690513.1 | | AU | |
| AD- | A- | 1406 | UUUUAAGGAUUCUUGG | | A- | 1758 | AUCCCAAGAAUCCUUAA | |
| 890225.1 | 1690270.1 | | GAU | | 1690271.1 | | AA | |
| AD- | A- | 1407 | UCUUUUUUAAGGAUUC | | A- | 1759 | CAAGAAUCCUUAAAAAA | |
| 890221.1 | 1690262.1 | | UUG | | 1690263.1 | | GA | |
| AD- | A- | 1408 | UUUUUAAGGAUUCUUG | | A- | 1760 | UCCCAAGAAUCCUUAAA | |
| 890224.1 | 1690268.1 | | GGA | | 1690269.1 | | AA | |
| AD- | A- | 1409 | AUUUUAACCACAGUGGA | 852-870 | A- | 1761 | GGUCCACUGUGGUUAA | 852-870 |
| 890243.1 | 1690306.1 | | CC | | 1690307.1 | | AAU | |
| AD- | A- | 1410 | UUUUAUUGCCAUUUUG | 1925-1943 | A- | 1762 | GGACAAAAUGGCAAUAA | 1925-1943 |
| 890443.1 | 1690706.1 | | UCC | | 1690707.1 | | AA | |

TABLE 3A
Exemplary Human MARC1 siRNA Modified Single Strands and Duplex Sequences
Column 1 indicates duplex name (the number following the decimal
point in a duplex name merely refers to a batch production number).
Column 2 indicates the name of the sense sequence.
Column 3 indicates the sequence ID for the sequence of Column 4.
Column 4 provides the modified sequence of a sense
strand suitable for use in a duplex described herein.
Column 5 indicates the antisense sequence name.
Column 6 indicates the sequence ID for the sequence of Column 7.
Column 7 provides the sequence of a modified antisense
strand suitable for use in a duplex described herein,
e.g., a duplex comprising the sense sequence in the
same row of the table.
Column 8 indicates the position in the target mRNA
(XM_011509900.3) that is complementary to the antisense
strand of Column 7.
Column 9 indicates the sequence ID for the
sequence of column 8.

| | | | | | Seq ID | | mRNA target | Seq ID |
|---|---|---|---|---|---|---|---|---|
| | Sense | Seq ID | Sense | Antisense | NO: | Antisense | sequence in | NO: |
| Duplex | sequence | NO: | sequence | sequence | (anti | sequence | XM_0115 | (mRNA |
| Name | name | (sense) | (5′-3′) | name | sense) | (5′-3′) | 09900.3 | target) |
| AD- | A- | 1763 | GGAUUUGACUUCU | A- | 1783 | UAAAAAAGAAGUCA | GGAUUUGACUUCUUU | 1803 |
| 890213. | 1690246. | | UUUUUAdTdT | 1690247.1 | | AAUCCdTdT | UUUA | |
| 1 | 1 | | | | | | | |
| AD- | A- | 1764 | AUUUGACUUCUUU | A- | 1784 | CUUAAAAAAGAAGU | AUUUGACUUCUUUU | 1804 |
| 890215. | 1690250. | | UUUAAGdTdT | 1690251.1 | | CAAAUdTdT | UUAAG | |
| 1 | 1 | | | | | | | |
| AD- | A- | 1765 | CCUUGGAUUUGAC | A- | 1785 | AAAGAAGUCAAAUCC | CCUUGGAUUUGACUU | 1805 |
| 890209. | 1690238. | | UUCUUUdTdT | 1690239.1 | | AAGGdTdT | CUUU | |
| 1 | 1 | | | | | | | |
| AD- | A- | 1766 | GAUUUGACUUCUU | A- | 1786 | UUAAAAAAGAAGUC | GAUUUGACUUCUUU | 1806 |
| 890214. | 1690248. | | UUUUAAdTdT | 1690249.1 | | AAAUCdTdT | UUUAA | |
| 1 | 1 | | | | | | | |
| AD- | A- | 1767 | CUUGGAUUUGACU | A- | 1787 | AAAAGAAGUCAAAUC | CUUGGAUUUGACUUC | 1807 |
| 890210. | 1690240. | | UCUUUUdTdT | 1690241.1 | | CAAGdTdT | UUUU | |
| 1 | 1 | | | | | | | |
| AD- | A- | 1768 | UCUUUCCUUGGAU | A- | 1788 | AGUCAAAUCCAAGGA | UCUUUCCUUGGAUUU | 1808 |
| 890206. | 1690232. | | UUGACUdTdT | 1690233.1 | | AAGAdTdT | GACU | |
| 1 | 1 | | | | | | | |
| AD- | A- | 1769 | UUUUUUAAGGAUU | A- | 1789 | CCCAAGAAUCCUUAA | UUUUUUAAGGAUUC | 1809 |
| 890223. | 1690266. | | CUUGGGdTdT | 1690267.1 | | AAAAdTdT | UUGGG | |
| 1 | 1 | | | | | | | |
| AD- | A- | 1770 | UGGAUUUGACUUC | A- | 1790 | AAAAAAGAAGUCAAA | UGGAUUUGACUUCUU | 1810 |
| 890212. | 1690244. | | UUUUUUdTdT | 1690245.1 | | UCCAdTdT | UUUU | |
| 1 | 1 | | | | | | | |
| AD- | A- | 1771 | AUCUUUCCUUGGA | A- | 1791 | GUCAAAUCCAAGGAA | AUCUUUCCUUGGAUU | 1811 |
| 890205. | 1690230. | | UUUGACdTdT | 1690231.1 | | AGAUdTdT | UGAC | |
| 1 | 1 | | | | | | | |
| AD- | A- | 1772 | UUGGAUUUGACUU | A- | 1792 | AAAAAGAAGUCAAA | UUGGAUUUGACUUCU | 1812 |
| 890211. | 1690242. | | CUUUUUdTdT | 1690243.1 | | UCCAAdTdT | UUUU | |
| 1 | 1 | | | | | | | |
| AD- | A- | 1773 | CUUUUUUAAGGAU | A- | 1793 | CCAAGAAUCCUUAAA | CUUUUUUAAGGAUUC | 1813 |
| 890222. | 1690264. | | UCUUGGdTdT | 1690265.1 | | AAAGdTdT | UUGG | |
| 1 | 1 | | | | | | | |
| AD- | A- | 1774 | UUUCCUUGGAUUU | A- | 1794 | GAAGUCAAAUCCAAG | UUUCCUUGGAUUUGA | 1814 |
| 890208. | 1690236. | | GACUUCdTdT | 1690237.1 | | GAAAdTdT | CUUC | |
| 1 | 1 | | | | | | | |
| AD- | A- | 1775 | ACUUCUUUUUUAA | A- | 1795 | GAAUCCUUAAAAAA | ACUUCUUUUUUAAGG | 1815 |
| 890220. | 1690260. | | GGAUUCdTdT | 1690261.1 | | GAAGUdTdT | AUUC | |
| 1 | 1 | | | | | | | |
| AD- | A- | 1776 | UUUGACUUCUUUU | A- | 1796 | CCUUAAAAAAGAAG | UUUGACUUCUUUUU | 1816 |
| 890216. | 1690252. | | UUAAGGdTdT | 1690253.1 | | UCAAAdTdT | UAAGG | |
| 1 | 1 | | | | | | | |
| AD- | A- | 1777 | GACUUCUUUUUUA | A- | 1797 | AAUCCUUAAAAAAGA | GACUUCUUUUUUAAG | 1817 |
| 890219. | 1690258. | | AGGAUUdTdT | 1690259.1 | | AGUCdTdT | GAUU | |
| 1 | 1 | | | | | | | |
| AD- | A- | 1778 | UGACUUCUUUUUU | A- | 1798 | AUCCUUAAAAAAGAA | UGACUUCUUUUUUAA | 1818 |
| 890218. | 1690256. | | AAGGAUdTdT | 1690257.1 | | GUCAdTdT | GGAU | |
| 1 | 1 | | | | | | | |
| AD- | A- | 1779 | UUGACUUCUUUUU | A- | 1799 | UCCUUAAAAAAGAA | UUGACUUCUUUUUU | 1819 |
| 890217. | 1690254. | | UAAGGAdTdT | 1690255.1 | | GUCAAdTdT | AAGGA | |
| 1 | 1 | | | | | | | |
| AD- | A- | 1780 | UUUUAAGGAUUCU | A- | 1800 | AUCCCAAGAAUCCUU | UUUUAAGGAUUCUU | 1820 |
| 890225. | 1690270. | | UGGGAUdTdT | 1690271.1 | | AAAAdTdT | GGGAU | |
| 1 | 1 | | | | | | | |
| AD- | A- | 1781 | UCUUUUUUAAGGA | A- | 1801 | CAAGAAUCCUUAAAA | UCUUUUUUAAGGAU | 1821 |
| 890221. | 1690262. | | UUCUUGdTdT | 1690263.1 | | AAGAdTdT | UCUUG | |
| 1 | 1 | | | | | | | |
| AD- | A- | 1782 | UUUUUAAGGAUUC | A- | 1802 | UCCCAAGAAUCCUUA | UUUUUAAGGAUUCU | 1822 |
| 890224. | 1690268. | | UUGGGAdTdT | 1690269.1 | | AAAAdTdT | UGGGA | |
| 1 | 1 | | | | | | | |

TABLE 3B
Exemplary Human MARC1 Unmodified Single Strands and Duplex Sequences.
Column 1 indicates duplex name (the number following the decimal point in a
duplex name merely refers to a batch production number).
Column 2 indicates the sense sequence name. Column 3 indicates the
sequence ID for the sequence of column 4.
Column 4 provides the unmodified sequence of a sense strand suitable
for use in a duplex described herein.
Column 5 provides the position in the target mRNA (XM_011509900.3)
of the sense strand of Column 4.
Column 6 indicates the antisense sequence name. Column 7 indicates
the sequence ID for the sequence of column 8.
Column 8 provides the sequence of an antisense strand suitable
for use in a duplex described herein,
without specifying chemical modifications.
Column 9 indicates the position in the target mRNA (XM_011509900.3)
that is complementary to the antisense strand of Column 8.

| | | | | mRNA | | Seq | | |
|---|---|---|---|---|---|---|---|---|
| | | | | target | | ID | | mRNA target |
| | | Seq ID | | range in | Antisense | NO: | antisense | range in |
| Duplex | Sense | NO: | Sense sequence | XM_0115099 | sequence | (anti | sequence | XM_01150990 |
| Name | sequence | (sense) | (5′-3′) | 00.3 | name | sense) | (5′-3′) | 0.3 |
| AD- | name | 1823 | GGAUUUGACUUCUUUUU | 1032-1050 | A- | 1843 | UAAAAAAGAAGUCA | 1032-1050 |
| 890213.1 | 1690246.1 | | UA | | 1690247.1 | | AAUCC | |
| AD- | A- | 1824 | AUUUGACUUCUUUUUUA | 1034-1052 | A- | 1844 | CUUAAAAAAGAAGU | 1034-1052 |
| 890215.1 | 1690250.1 | | AG | | 1690251.1 | | CAAAU | |
| AD- | A- | 1825 | CCUUGGAUUUGACUUCU | 1028-1046 | A- | 1845 | AAAGAAGUCAAAUC | 1028-1046 |
| 890209.1 | 1690238.1 | | UU | | 1690239.1 | | CAAGG | |
| AD- | A- | 1826 | GAUUUGACUUCUUUUUU | 1033-1051 | A- | 1846 | UUAAAAAAGAAGUC | 1033-1051 |
| 890214.1 | 1690248.1 | | AA | | 1690249.1 | | AAAUC | |
| AD- | A- | 1827 | CUUGGAUUUGACUUCUU | 1029-1047 | A- | 1847 | AAAAGAAGUCAAAU | 1029-1047 |
| 890210.1 | 1690240.1 | | UU | | 1690241.1 | | CCAAG | |
| AD- | A- | 1828 | UCUUUCCUUGGAUUUGA | 1023-1041 | A- | 1848 | AGUCAAAUCCAAGG | 1023-1041 |
| 890206.1 | 1690232.1 | | CU | | 1690233.1 | | AAAGA | |
| AD- | A- | 1829 | UUUUUUAAGGAUUCUUG | 1044-1062 | A- | 1849 | CCCAAGAAUCCUUA | 1044-1062 |
| 890223.1 | 1690266.1 | | GG | | 1690267.1 | | AAAAA | |
| AD- | A- | 1830 | UGGAUUUGACUUCUUUU | 1031-1049 | A- | 1850 | AAAAAAGAAGUCAA | 1031-1049 |
| 890212.1 | 1690244.1 | | UU | | 1690245.1 | | AUCCA | |
| AD- | A- | 1831 | AUCUUUCCUUGGAUUUG | 1022-1040 | A- | 1851 | GUCAAAUCCAAGGA | 1022-1040 |
| 890205.1 | 1690230.1 | | AC | | 1690231.1 | | AAGAU | |
| AD- | A- | 1832 | UUGGAUUUGACUUCUUU | 1030-1048 | A- | 1852 | AAAAAGAAGUCAAA | 1030-1048 |
| 890211.1 | 1690242.1 | | UU | | 1690243.1 | | UCCAA | |
| AD- | A- | 1833 | CUUUUUUAAGGAUUCUU | 1043-1061 | A- | 1853 | CCAAGAAUCCUUAA | 1043-1061 |
| 890222.1 | 1690264.1 | | GG | | 1690265.1 | | AAAAG | |
| AD- | A- | 1834 | UUUCCUUGGAUUUGACU | 1025-1043 | A- | 1854 | GAAGUCAAAUCCAA | 1025-1043 |
| 890208.1 | 1690236.1 | | UC | | 1690237.1 | | GGAAA | |
| AD- | A- | 1835 | ACUUCUUUUUUAAGGAU | 1039-1057 | A- | 1855 | GAAUCCUUAAAAAA | 1039-1057 |
| 890220.1 | 1690260.1 | | UC | | 1690261.1 | | GAAGU | |
| AD- | A- | 1836 | UUUGACUUCUUUUUUAA | 1035-1053 | A- | 1856 | CCUUAAAAAAGAAG | 1035-1053 |
| 890216.1 | 1690252.1 | | GG | | 1690253.1 | | UCAAA | |
| AD- | A- | 1837 | GACUUCUUUUUUAAGGA | 1038-1056 | A- | 1857 | AAUCCUUAAAAAAG | 1038-1056 |
| 890219.1 | 1690258.1 | | UU | | 1690259.1 | | AAGUC | |
| AD- | A- | 1838 | UGACUUCUUUUUUAAGG | 1037-1055 | A- | 1858 | AUCCUUAAAAAAGA | 1037-1055 |
| 890218.1 | 1690256.1 | | AU | | 1690257.1 | | AGUCA | |
| AD- | A- | 1839 | UUGACUUCUUUUUUAAG | 1036-1054 | A- | 1859 | UCCUUAAAAAAGAA | 1036-1054 |
| 890217.1 | 1690254.1 | | GA | | 1690255.1 | | GUCAA | |
| AD- | A- | 1840 | UUUUAAGGAUUCUUGGG | 1046-1064 | A- | 1860 | AUCCCAAGAAUCCU | 1046-1064 |
| 890225.1 | 1690270.1 | | AU | | 1690271.1 | | UAAAA | |
| AD- | A- | 1841 | UCUUUUUUAAGGAUUCU | 1042-1060 | A- | 1861 | CAAGAAUCCUUAAA | 1042-1060 |
| 890221.1 | 1690262.1 | | UG | | 1690263.1 | | AAAGA | |
| AD- | A- | 1842 | UUUUUAAGGAUUCUUGG | 1045-1063 | A- | 1862 | UCCCAAGAAUCCUU | 1045-1063 |
| 890224.1 | 1690268.1 | | GA | | 1690269.1 | | AAAAA | |

TABLE 4A
Exemplary Mouse MARC1 siRNA Modified Single Strands and Duplex Sequences
Column 1 indicates duplex name (the number following the decimal point
in a duplex name merely refers to a batch production
number). Column 2 indicates the name of the sense sequence.
Column 3 indicates the sequence ID for the sequence of column 4.
Column 4 provides the modified sequence of a sense strand suitable
for use in a duplex described herein. Column 5 indicates the
antisense sequence name. Column 6 indicates the sequence ID for
the sequence of column 7. Column 7 provides the sequence of a
modified antisense strand suitable for use in a duplex described
herein, e.g., a duplex comprising the sense sequence in the same row
of the table. Column 8 indicates the position in the target mRNA
(NM_001290273.1) that is complementary to the antisense strand of
Column 7. Column 9 indicates the sequence ID for the sequence of column 8.

| | | Seq | | Anti- | Seq ID | | | Seq ID |
|---|---|---|---|---|---|---|---|---|
| | Sense | ID | | sense | NO: | | mRNA target | NO: |
| Duplex | sequence | NO: | Sense sequence | sequence | (anti | Antisense sequence | sequence in | (mRNA |
| Name | name | (sense) | (5′-3′) | name | sense) | (5′-3′) | NM_001290273.1 | target) |
| AD- | A- | 1863 | cscsagaaGfaAfUfGfu | A- | 1908 | asAfsuucUfgGfAfacau | AGCCAGAAGAAUGUU | 1953 |
| 646719. | 1232172. | | uccagaauuL96 | 1232173.1 | | UfcUfucuggscsu | CCAGAAUG | |
| 1 | 1 | | | | | | | |
| AD- | A- | 1864 | uscsagauGfcAfAfGfu | A- | 1909 | asAfsagaAfuGfGfacuu | ACUCAGAUGCAAGUC | 1954 |
| 646024. | 1230782. | | ccauucuuuL96 | 1230783.1 | | GfcAfucugasgsu | CAUUCUUG | |
| 1 | 1 | | | | | | | |
| AD- | A- | 1865 | csasgaugCfaAfGfUfc | A- | 1910 | asCfsaagAfaUfGfgacu | CUCAGAUGCAAGUCC | 1955 |
| 646025. | 1230784. | | cauucuuguL96 | 1230785.1 | | UfgCfaucugsasg | AUUCUUGG | |
| 1 | 1 | | | | | | | |
| AD- | A- | 1866 | uscsucccUfaGfCfCfu | A- | 1911 | asCfscaaAfaGfAfaggc | CAUCUCCCUAGCCUU | 1956 |
| 646676. | 1232086. | | ucuuuugguL96 | 1232087.1 | | UfaGfggagasusg | CUUUUGGG | |
| 1 | 1 | | | | | | | |
| AD- | A- | 1867 | asgsccuuCfuUfUfUfg | A- | 1912 | asCfsucuUfuCfCfcaaa | CUAGCCUUCUUUUGG | 1957 |
| 646683. | 1232100. | | ggaaagaguL96 | 1232101.1 | | AfgAfaggcusasg | GAAAGAGA | |
| 1 | 1 | | | | | | | |
| AD- | A- | 1868 | gsasauuaAfaUfAfCfu | A- | 1913 | asCfsuugGfgAfGfagua | GGGAAUUAAAUACUC | 1958 |
| 646753. | 1232240. | | cucccaaguL96 | 1232241.1 | | UfuUfaauucscsc | UCCCAAGU | |
| 1 | 1 | | | | | | | |
| AD- | A- | 1869 | asgsgauuCfuUfGfGfa | A- | 1914 | asAfsaccUfcGfUfucca | UGAGGAUUCUUGGAA | 1959 |
| 646154. | 1231042. | | acgagguuuL96 | 1231043.1 | | AfgAfauccuscsa | CGAGGUUC | |
| 1 | 1 | | | | | | | |
| AD- | A- | 1870 | ususggaaCfgAfGfGfu | A- | 1915 | asCfsaauGfaGfAfaccu | UCUUGGAACGAGGUU | 1960 |
| 646161. | 1231056. | | ucucauuguL96 | 1231057.1 | | CfgUfuccaasgsa | CUCAUUGG | |
| 1 | 1 | | | | | | | |
| AD- | A- | 1871 | asuscuccCfuAfGfCfc | A- | 1916 | asCfsaaaAfgAfAfggcu | UCAUCUCCCUAGCCU | 1961 |
| 646675. | 1232084. | | uucuuuuguL96 | 1232085.1 | | AfgGfgagausgsa | UCUUUUGG | |
| 1 | 1 | | | | | | | |
| AD- | A- | 1872 | cscscuagCfcUfUfCfu | A- | 1917 | asUfsuccCfaAfAfagaa | CUCCCUAGCCUUCUU | 1962 |
| 646679. | 1232092. | | uuugggaauL96 | 1232093.1 | | GfgCfuagggsasg | UUGGGAAA | |
| 1 | 1 | | | | | | | |
| AD- | A- | 1873 | csusagccUfuCfUfUfu | A- | 1918 | asCfsuuuCfcCfAfaaag | CCCUAGCCUUCUUUU | 1963 |
| 646681. | 1232096. | | ugggaaaguL96 | 1232097.1 | | AfaGfgcuagsgsg | GGGAAAGA | |
| 1 | 1 | | | | | | | |
| AD- | A- | 1874 | csasgaagAfaUfGfUfu | A- | 1919 | asCfsauuCfuGfGfaaca | GCCAGAAGAAUGUUC | 1964 |
| 646720. | 1232174. | | ccagaauguL96 | 1232175.1 | | UfuCfuucugsgsc | CAGAAUGU | |
| 1 | 1 | | | | | | | |
| AD- | A- | 1875 | gsgsaauuAfaAfUfAfc | A- | 1920 | asUfsuggGfaGfAfgua | CGGGAAUUAAAUACU | 1965 |
| 646752. | 1232238. | | ucucccaauL96 | 1232239.1 | | uUfuAfauuccscsg | CUCCCAAG | |
| 1 | 1 | | | | | | | |
| AD- | A- | 1876 | asasuuaaAfuAfCfUfc | A- | 1921 | asAfscuuGfgGfAfgagu | GGAAUUAAAUACUCU | 1966 |
| 646754. | 1232242. | | ucccaaguuL96 | 1232243.1 | | AfuUfuaauuscsc | CCCAAGUA | |
| 1 | 1 | | | | | | | |
| AD- | A- | 1877 | gsasugcaAfgUfCfCfa | A- | 1922 | asAfsccaAfgAfAfugga | CAGAUGCAAGUCCAU | 1967 |
| 646027. | 1230788. | | uucuugguuL96 | 1230789.1 | | CfuUfgcaucsusg | UCUUGGUC | |
| 1 | 1 | | | | | | | |
| AD- | A- | 1878 | gsasuucuUfgGfAfAfc | A- | 1923 | asAfsgaaCfcUfCfguuc | AGGAUUCUUGGAACG | 1968 |
| 646156. | 1231046. | | gagguucuuL96 | 1231047.1 | | CfaAfgaaucscsu | AGGUUCUC | |
| 1 | 1 | | | | | | | |
| AD- | A- | 1879 | csusuggaAfcGfAfGfg | A- | 1924 | asAfsaugAfgAfAfccuc | UUCUUGGAACGAGGU | 1969 |
| 646160. | 1231054. | | uucucauuuL96 | 1231055.1 | | GfuUfccaagsasa | UCUCAUUG | |
| 1 | 1 | | | | | | | |
| AD- | A- | 1880 | cscsucugGfaAfAfCfa | A- | 1925 | asCfsucuUfcAfGfuguu | AGCCUCUGGAAACAC | 1970 |
| 646270. | 1231274. | | cugaagaguL96 | 1231275.1 | | UfcCfagaggscsu | UGAAGAGC | |
| 1 | 1 | | | | | | | |
| AD- | A- | 1881 | csuscccuAfgCfCfUfu | A- | 1926 | asCfsccaAfaAfGfaagg | AUCUCCCUAGCCUUC | 1971 |
| 646677. | 1232088. | | cuuuuggguL96 | 1232089.1 | | CfuAfgggagsasu | UUUUGGGA | |
| 1 | 1 | | | | | | | |
| AD- | A- | 1882 | uscsccuaGfcCfUfUfc | A- | 1927 | asUfscccAfaAfAfgaag | UCUCCCUAGCCUUCU | 1972 |
| 646678. | 1232090. | | uuuugggauL96 | 1232091.1 | | GfcUfagggasgsa | UUUGGGAA | |
| 1 | 1 | | | | | | | |
| AD- | A- | 1883 | gsusguaaGfcCfAfGfa | A- | 1928 | asAfsacaUfuCfUfucug | CUGUGUAAGCCAGAA | 1973 |
| 646712. | 1232158. | | agaauguuuL96 | 1232159.1 | | GfcUfuacacsasg | GAAUGUUC | |
| 1 | 1 | | | | | | | |
| AD- | A- | 1884 | csuscagaUfgCfAfAfg | A- | 1929 | asAfsgaaUfgGfAfcuug | UACUCAGAUGCAAGU | 1974 |
| 646023. | 1230780. | | uccauucuuL96 | 1230781.1 | | CfaUfcugagsusa | CCAUUCUU | |
| 1 | 1 | | | | | | | |
| AD- | A- | 1885 | usgsaggaUfuCfUfUfg | A- | 1930 | asCfscucGfuUfCfcaag | GCUGAGGAUUCUUGG | 1975 |
| 646152. | 1231038. | | gaacgagguL96 | 1231039.1 | | AfaUfccucasgsc | AACGAGGU | |
| 1 | 1 | | | | | | | |
| AD- | A- | 1886 | ususcuugGfaAfCfGfa | A- | 1931 | asUfsgagAfaCfCfucgu | GAUUCUUGGAACGAG | 1976 |
| 646158. | 1231050. | | gguucucauL96 | 1231051.1 | | UfcCfaagaasusc | GUUCUCAU | |
| 1 | 1 | | | | | | | |
| AD- | A- | 1887 | gsasacgaGfgUfUfCfu | A- | 1932 | asCfsuccAfaUfGfagaa | UGGAACGAGGUUCUC | 1977 |
| 646164. | 1231062. | | cauuggaguL96 | 1231063.1 | | CfcUfcguucscsa | AUUGGAGA | |
| 1 | 1 | | | | | | | |
| AD- | A- | 1888 | csasucucCfcUfAfGfc | A- | 1933 | asAfsaaaGfaAfGfgcua | AUCAUCUCCCUAGCC | 1978 |
| 646674. | 1232082. | | cuucuuuuuL96 | 1232083.1 | | GfgGfagaugsasu | UUCUUUUG | |
| 1 | 1 | | | | | | | |
| AD- | A- | 1889 | usasgccuUfcUfUfUfu | A- | 1934 | asUfscuuUfcCfCfaaaa | CCUAGCCUUCUUUUG | 1979 |
| 646682. | 1232098. | | gggaaagauL96 | 1232099.1 | | GfaAfggcuasgsg | GGAAAGAG | |
| 1 | 1 | | | | | | | |
| AD- | A- | 1890 | gsusgucuAfaGfAfUfg | A- | 1935 | asUfscaaAfuCfUfcauc | GGGUGUCUAAGAUGA | 1980 |
| 647068. | 1232870. | | agauuugauL96 | 1232871.1 | | UfuAfgacacscsc | GAUUUGAU | |
| 1 | 1 | | | | | | | |
| AD- | A- | 1891 | asgsaugcAfaGfUfCfc | A- | 1936 | asCfscaaGfaAfUfggac | UCAGAUGCAAGUCCA | 1981 |
| 646026. | 1230786. | | auucuugguL96 | 1230787.1 | | UfuGfcaucusgsa | UUCUUGGU | |
| 1 | 1 | | | | | | | |
| AD- | A- | 1892 | usasugcuGfaGfGfAf | A- | 1937 | asUfsuccAfaGfAfaucc | UUUAUGCUGAGGAU | 1982 |
| 646147. | 1231028. | | uucuuggaauL96 | 1231029.1 | | UfcAfgcauasasa | UCUUGGAAC | |
| 1 | 1 | | | | | | | |
| AD- | A- | 1893 | csusgaggAfuUfCfUfu | A- | 1938 | asCfsucgUfuCfCfaaga | UGCUGAGGAUUCUUG | 1983 |
| 646151. | 1231036. | | ggaacgaguL96 | 1231037.1 | | AfuCfcucagscsa | GAACGAGG | |
| 1 | 1 | | | | | | | |
| AD- | A- | 1894 | gsasggauUfcUfUfGfg | A- | 1939 | asAfsccuCfgUfUfccaa | CUGAGGAUUCUUGGA | 1984 |
| 646153. | 1231040. | | aacgagguuL96 | 1231041.1 | | GfaAfuccucsasg | ACGAGGUU | |
| 1 | 1 | | | | | | | |
| AD- | A- | 1895 | usgsgaacGfaGfGfUfu | A- | 1940 | asCfscaaUfgAfGfaacc | CUUGGAACGAGGUUC | 1985 |
| 646162. | 1231058. | | cucauugguL96 | 1231059.1 | | UfcGfuuccasasg | UCAUUGGA | |
| 1 | 1 | | | | | | | |
| AD- | A- | 1896 | uscsaucuCfcCfUfAfg | A- | 1941 | asAfsaagAfaGfGfcuag | CAUCAUCUCCCUAGCC | 1986 |
| 646673. | 1232080. | | ccuucuuuuL96 | 1232081.1 | | GfgAfgaugasusg | UUCUUUU | |
| 1 | 1 | | | | | | | |
| AD- | A- | 1897 | ascsacugUfgUfAfAfg | A- | 1942 | asUfscuuCfuGfGfcuu | GGACACUGUGUAAGC | 1987 |
| 646707. | 1232148. | | ccagaagauL96 | 1232149.1 | | aCfaCfaguguscsc | CAGAAGAA | |
| 1 | 1 | | | | | | | |
| AD- | A- | 1898 | csusguguAfaGfCfCfa | A- | 1943 | asCfsauuCfuUfCfuggc | CACUGUGUAAGCCAG | 1988 |
| 646710. | 1232154. | | gaagaauguL96 | 1232155.1 | | UfuAfcacagsusg | AAGAAUGU | |
| 1 | 1 | | | | | | | |
| AD- | A- | 1899 | usgsuguaAfgCfCfAfg | A- | 1944 | asAfscauUfcUfUfcugg | ACUGUGUAAGCCAGA | 1989 |
| 646711. | 1232156. | | aagaauguuL96 | 1232157.1 | | CfuUfacacasgsu | AGAAUGUU | |
| 1 | 1 | | | | | | | |
| AD- | A- | 1900 | gsusaagcCfaGfAfAfg | A- | 1945 | asGfsgaaCfaUfUfcuuc | GUGUAAGCCAGAAGA | 1990 |
| 646714. | 1232162. | | aauguuccuL96 | 1232163.1 | | UfgGfcuuacsasc | AUGUUCCA | |
| 1 | 1 | | | | | | | |
| AD- | A- | 1901 | gsgsguguCfuAfAfGfa | A- | 1946 | asAfsaauCfuCfAfucuu | CUGGGUGUCUAAGAU | 1991 |
| 647066. | 1232866. | | ugagauuuuL96 | 1232867.1 | | AfgAfcacccsasg | GAGAUUUG | |
| 1 | 1 | | | | | | | |
| AD- | A- | 1902 | asusgcugAfgGfAfUfu | A- | 1947 | asGfsuucCfaAfGfaauc | UUAUGCUGAGGAUUC | 1992 |
| 646148. | 1231030. | | cuuggaacuL96 | 1231031.1 | | CfuCfagcausasa | UUGGAACG | |
| 1 | 1 | | | | | | | |
| AD- | A- | 1903 | gsgsauucUfuGfGfAfa | A- | 1948 | asGfsaacCfuCfGfuucc | GAGGAUUCUUGGAAC | 1993 |
| 646155. | 1231044. | | cgagguucuL96 | 1231045.1 | | AfaGfaauccsusc | GAGGUUCU | |
| 1 | 1 | | | | | | | |
| AD- | A- | 1904 | asascgagGfuUfCfUfc | A- | 1949 | asUfscucCfaAfUfgaga | GGAACGAGGUUCUCA | 1994 |
| 646165. | 1231064. | | auuggagauL96 | 1231065.1 | | AfcCfucguuscsc | UUGGAGAU | |
| 1 | 1 | | | | | | | |
| AD- | A- | 1905 | asgsccucUfgGfAfAfa | A- | 1950 | asCfsuucAfgUfGfuuuc | GGAGCCUCUGGAAAC | 1995 |
| 646268. | 1231270. | | cacugaaguL96 | 1231271.1 | | CfaGfaggcuscsc | ACUGAAGA | |
| 1 | 1 | | | | | | | |
| AD- | A- | 1906 | csusggaaAfaUfCfCfa | A- | 1951 | asAfsuugUfcCfCfugga | CUCUGGAAAAUCCAG | 1996 |
| 646360. | 1231454. | | gggacaauuL96 | 1231455.1 | | UfuUfuccagsasg | GGACAAUC | |
| 1 | 1 | | | | | | | |
| AD- | A- | 1907 | gsgsugucUfaAfGfAfu | A- | 1952 | asCfsaaaUfcUfCfaucu | UGGGUGUCUAAGAU | 1997 |
| 647067. | 1232868. | | gagauuuguL96 | 1232869.1 | | UfaGfacaccscsa | GAGAUUUGA | |
| 1 | 1 | | | | | | | |

TABLE 4B
Exemplary Mouse MARC1 Unmodified Single Strands and Duplex Sequences.
Column 1 indicates duplex name (the number following the decimal
point in a duplex name merely refers to a batch production
number). Column 2 indicates the sense sequence name.
Column 3 indicates the sequence ID for the sequence of column 4.
Column 4 provides the unmodified sequence of a sense strand
suitable for use in a duplex described herein.
Column 5 indicates the position in
the target mRNA (NM_001290273.1) of the sense strand of Column 4.
Column 6 indicates the antisense sequence name.
Column 7 indicates the sequence ID for the sequence of column 8.
Column 8 provides the sequence of an antisense strand suitable
for use in a duplex described herein, without specifying
chemical modifications. Column 9 indicates the position in
the target mRNA (NM_001290273.1) that is complementary
to the antisense strand of Column 8.

| | | | | mRNA target | | Seq ID | | mRNA target |
|---|---|---|---|---|---|---|---|---|
| | Sense | Seq ID | | range in | Antisense | NO: | antisense | range in |
| Duplex | sequence | NO: | Sense sequence | NM_00129 | sequence | (anti | sequence | NM_0012 |
| Name | name | (sense) | (5′-3′) | 0273.1 | name | sense) | (5′-3′) | 90273.1 |
| AD- | A- | 1998 | CCAGAAGAAUGUUCCAG | 1547-1567 | A- | 2043 | AAUUCUGGAACAUUCUU | 1545-1567 |
| 646719 | 1232172. | | AAUU | | 1232173.1 | | CUGGCU | |
| .1 | 1 | | | | | | | |
| AD- | A- | 1999 | UCAGAUGCAAGUCCAUU | 802-822 | A- | 2044 | AAAGAAUGGACUUGCAU | 800-822 |
| 646024 | 1230782. | | CUUU | | 1230783.1 | | CUGAGU | |
| .1 | 1 | | | | | | | |
| AD- | A- | 2000 | CAGAUGCAAGUCCAUUC | 803-823 | A- | 2045 | ACAAGAAUGGACUUGCA | 801-823 |
| 646025 | 1230784. | | UUGU | | 1230785.1 | | UCUGAG | |
| .1 | 1 | | | | | | | |
| AD- | A- | 2001 | UCUCCCUAGCCUUCUUU | 1493-1513 | A- | 2046 | ACCAAAAGAAGGCUAGGG | 1491-1513 |
| 646676 | 1232086. | | UGGU | | 1232087.1 | | AGAUG | |
| .1 | 1 | | | | | | | |
| AD- | A- | 2002 | AGCCUUCUUUUGGGAA | 1500-1520 | A- | 2047 | ACUCUUUCCCAAAAGAAG | 1498-1520 |
| 646683 | 1232100. | | AGAGU | | 1232101.1 | | GCUAG | |
| .1 | 1 | | | | | | | |
| AD- | A- | 2003 | GAAUUAAAUACUCUCCC | 1601-1621 | A- | 2048 | ACUUGGGAGAGUAUUUA | 1599-1621 |
| 646753 | 1232240. | | AAGU | | 1232241.1 | | AUUCCC | |
| .1 | 1 | | | | | | | |
| AD- | A- | 2004 | AGGAUUCUUGGAACGA | 932-952 | A- | 2049 | AAACCUCGUUCCAAGAAU | 930-952 |
| 646154 | 1231042. | | GGUUU | | 1231043.1 | | CCUCA | |
| .1 | 1 | | | | | | | |
| AD- | A- | 2005 | UUGGAACGAGGUUCUC | 939-959 | A- | 2050 | ACAAUGAGAACCUCGUUC | 937-959 |
| 646161 | 1231056. | | AUUGU | | 1231057.1 | | CAAGA | |
| .1 | 1 | | | | | | | |
| AD- | A- | 2006 | AUCUCCCUAGCCUUCUU | 1492-1512 | A- | 2051 | ACAAAAGAAGGCUAGGG | 1490-1512 |
| 646675 | 1232084. | | UUGU | | 1232085.1 | | AGAUGA | |
| .1 | 1 | | | | | | | |
| AD- | A- | 2007 | CCCUAGCCUUCUUUUGG | 1496-1516 | A- | 2052 | AUUCCCAAAAGAAGGCUA | 1494-1516 |
| 646679 | 1232092. | | GAAU | | 1232093.1 | | GGGAG | |
| .1 | 1 | | | | | | | |
| AD- | A- | 2008 | CUAGCCUUCUUUUGGG | 1498-1518 | A- | 2053 | ACUUUCCCAAAAGAAGGC | 1496-1518 |
| 646681 | 1232096. | | AAAGU | | 1232097.1 | | UAGGG | |
| .1 | 1 | | | | | | | |
| AD- | A- | 2009 | CAGAAGAAUGUUCCAGA | 1548-1568 | A- | 2054 | ACAUUCUGGAACAUUCU | 1546-1568 |
| 646720 | 1232174. | | AUGU | | 1232175.1 | | UCUGGC | |
| .1 | 1 | | | | | | | |
| AD- | A- | 2010 | GGAAUUAAAUACUCUCC | 1600-1620 | A- | 2055 | AUUGGGAGAGUAUUUAA | 1598-1620 |
| 646752 | 1232238. | | CAAU | | 1232239.1 | | UUCCCG | |
| .1 | 1 | | | | | | | |
| AD- | A- | 2011 | AAUUAAAUACUCUCCCA | 1602-1622 | A- | 2056 | AACUUGGGAGAGUAUUU | 1600-1622 |
| 646754 | 1232242. | | AGUU | | 1232243.1 | | AAUUCC | |
| .1 | 1 | | | | | | | |
| AD- | A- | 2012 | GAUGCAAGUCCAUUCUU | 805-825 | A- | 2057 | AACCAAGAAUGGACUUGC | 803-825 |
| 646027 | 1230788. | | GGUU | | 1230789.1 | | AUCUG | |
| .1 | 1 | | | | | | | |
| AD- | A- | 2013 | GAUUCUUGGAACGAGG | 934-954 | A- | 2058 | AAGAACCUCGUUCCAAGA | 932-954 |
| 646156 | 1231046. | | UUCUU | | 1231047.1 | | AUCCU | |
| .1 | 1 | | | | | | | |
| AD- | A- | 2014 | CUUGGAACGAGGUUCUC | 938-958 | A- | 2059 | AAAUGAGAACCUCGUUCC | 936-958 |
| 646160 | 1231054. | | AUUU | | 1231055.1 | | AAGAA | |
| .1 | 1 | | | | | | | |
| AD- | A- | 2015 | CCUCUGGAAACACUGAA | 1048-1068 | A- | 2060 | ACUCUUCAGUGUUUCCA | 1046-1068 |
| 646270 | 1231274. | | GAGU | | 1231275.1 | | GAGGCU | |
| .1 | 1 | | | | | | | |
| AD- | A- | 2016 | CUCCCUAGCCUUCUUUU | 1494-1514 | A- | 2061 | ACCCAAAAGAAGGCUAGG | 1492-1514 |
| 646677 | 1232088. | | GGGU | | 1232089.1 | | GAGAU | |
| .1 | 1 | | | | | | | |
| AD- | A- | 2017 | UCCCUAGCCUUCUUUUG | 1495-1515 | A- | 2062 | AUCCCAAAAGAAGGCUAG | 1493-1515 |
| 646678 | 1232090. | | GGAU | | 1232091.1 | | GGAGA | |
| .1 | 1 | | | | | | | |
| AD- | A- | 2018 | GUGUAAGCCAGAAGAAU | 1540-1560 | A- | 2063 | AAACAUUCUUCUGGCUU | 1538-1560 |
| 646712 | 1232158. | | GUUU | | 1232159.1 | | ACACAG | |
| .1 | 1 | | | | | | | |
| AD- | A- | 2019 | CUCAGAUGCAAGUCCAU | 801-821 | A- | 2064 | AAGAAUGGACUUGCAUC | 799-821 |
| 646023 | 1230780. | | UCUU | | 1230781.1 | | UGAGUA | |
| .1 | 1 | | | | | | | |
| AD- | A- | 2020 | UGAGGAUUCUUGGAAC | 930-950 | A- | 2065 | ACCUCGUUCCAAGAAUCC | 928-950 |
| 646152 | 1231038. | | GAGGU | | 1231039.1 | | UCAGC | |
| .1 | 1 | | | | | | | |
| AD- | A- | 2021 | UUCUUGGAACGAGGUU | 936-956 | A- | 2066 | AUGAGAACCUCGUUCCAA | 934-956 |
| 646158 | 1231050. | | CUCAU | | 1231051.1 | | GAAUC | |
| .1 | 1 | | | | | | | |
| AD- | A- | 2022 | GAACGAGGUUCUCAUU | 942-962 | A- | 2067 | ACUCCAAUGAGAACCUCG | 940-962 |
| 646164 | 1231062. | | GGAGU | | 1231063.1 | | UUCCA | |
| .1 | 1 | | | | | | | |
| AD- | A- | 2023 | CAUCUCCCUAGCCUUCU | 1491-1511 | A- | 2068 | AAAAAGAAGGCUAGGGA | 1489-1511 |
| 646674 | 1232082. | | UUUU | | 1232083.1 | | GAUGAU | |
| .1 | 1 | | | | | | | |
| AD- | A- | 2024 | UAGCCUUCUUUUGGGA | 1499-1519 | A- | 2069 | AUCUUUCCCAAAAGAAGG | 1497-1519 |
| 646682 | 1232098. | | AAGAU | | 1232099.1 | | CUAGG | |
| .1 | 1 | | | | | | | |
| AD- | A- | 2025 | GUGUCUAAGAUGAGAU | 1934-1954 | A- | 2070 | AUCAAAUCUCAUCUUAGA | 1932-1954 |
| 647068 | 1232870. | | UUGAU | | 1232871.1 | | CACCC | |
| .1 | 1 | | | | | | | |
| AD- | A- | 2026 | AGAUGCAAGUCCAUUCU | 804-824 | A- | 2071 | ACCAAGAAUGGACUUGCA | 802-824 |
| 646026 | 1230786. | | UGGU | | 1230787.1 | | UCUGA | |
| .1 | 1 | | | | | | | |
| AD- | A- | 2027 | UAUGCUGAGGAUUCUU | 925-945 | A- | 2072 | AUUCCAAGAAUCCUCAGC | 923-945 |
| 646147 | 1231028. | | GGAAU | | 1231029.1 | | AUAAA | |
| .1 | 1 | | | | | | | |
| AD- | A- | 2028 | CUGAGGAUUCUUGGAA | 929-949 | A- | 2073 | ACUCGUUCCAAGAAUCCU | 927-949 |
| 646151 | 1231036. | | CGAGU | | 1231037.1 | | CAGCA | |
| .1 | 1 | | | | | | | |
| AD- | A- | 2029 | GAGGAUUCUUGGAACG | 931-951 | A- | 2074 | AACCUCGUUCCAAGAAUC | 929-951 |
| 646153 | 1231040. | | AGGUU | | 1231041.1 | | CUCAG | |
| .1 | 1 | | | | | | | |
| AD- | A- | 2030 | UGGAACGAGGUUCUCA | 940-960 | A- | 2075 | ACCAAUGAGAACCUCGUU | 938-960 |
| 646162 | 1231058. | | UUGGU | | 1231059.1 | | CCAAG | |
| .1 | 1 | | | | | | | |
| AD- | A- | 2031 | UCAUCUCCCUAGCCUUC | 1490-1510 | A- | 2076 | AAAAGAAGGCUAGGGAG | 1488-1510 |
| 646673 | 1232080. | | UUUU | | 1232081.1 | | AUGAUG | |
| .1 | 1 | | | | | | | |
| AD- | A- | 2032 | ACACUGUGUAAGCCAGA | 1535-1555 | A- | 2077 | AUCUUCUGGCUUACACA | 1533-1555 |
| 646707 | 1232148. | | AGAU | | 1232149.1 | | GUGUCC | |
| .1 | 1 | | | | | | | |
| AD- | A- | 2033 | CUGUGUAAGCCAGAAGA | 1538-1558 | A- | 2078 | ACAUUCUUCUGGCUUAC | 1536-1558 |
| 646710 | 1232154. | | AUGU | | 1232155.1 | | ACAGUG | |
| .1 | 1 | | | | | | | |
| AD- | A- | 2034 | UGUGUAAGCCAGAAGAA | 1539-1559 | A- | 2079 | AACAUUCUUCUGGCUUA | 1537-1559 |
| 646711 | 1232156. | | UGUU | | 1232157.1 | | CACAGU | |
| .1 | 1 | | | | | | | |
| AD- | A- | 2035 | GUAAGCCAGAAGAAUGU | 1542-1562 | A- | 2080 | AGGAACAUUCUUCUGGC | 1540-1562 |
| 646714 | 1232162. | | UCCU | | 1232163.1 | | UUACAC | |
| .1 | 1 | | | | | | | |
| AD- | A- | 2036 | GGGUGUCUAAGAUGAG | 1932-1952 | A- | 2081 | AAAAUCUCAUCUUAGACA | 1930-1952 |
| 647066 | 1232866. | | AUUUU | | 1232867.1 | | CCCAG | |
| .1 | 1 | | | | | | | |
| AD- | A- | 2037 | AUGCUGAGGAUUCUUG | 926-946 | A- | 2082 | AGUUCCAAGAAUCCUCAG | 924-946 |
| 646148 | 1231030. | | GAACU | | 1231031.1 | | CAUAA | |
| .1 | 1 | | | | | | | |
| AD- | A- | 2038 | GGAUUCUUGGAACGAG | 933-953 | A- | 2083 | AGAACCUCGUUCCAAGAA | 931-953 |
| 646155 | 1231044. | | GUUCU | | 1231045.1 | | UCCUC | |
| .1 | 1 | | | | | | | |
| AD- | A- | 2039 | AACGAGGUUCUCAUUG | 943-963 | A- | 2084 | AUCUCCAAUGAGAACCUC | 941-963 |
| 646165 | 1231064. | | GAGAU | | 1231065.1 | | GUUCC | |
| .1 | 1 | | | | | | | |
| AD- | A- | 2040 | AGCCUCUGGAAACACUG | 1046-1066 | A- | 2085 | ACUUCAGUGUUUCCAGA | 1044-1066 |
| 646268 | 1231270. | | AAGU | | 1231271.1 | | GGCUCC | |
| .1 | 1 | | | | | | | |
| AD- | A- | 2041 | CUGGAAAAUCCAGGGAC | 1138-1158 | A- | 2086 | AAUUGUCCCUGGAUUUU | 1136-1158 |
| 646360 | 1231454. | | AAUU | | 1231455.1 | | CCAGAG | |
| .1 | 1 | | | | | | | |
| AD- | A- | 2042 | GGUGUCUAAGAUGAGA | 1933-1953 | A- | 2087 | ACAAAUCUCAUCUUAGAC | 1931-1953 |
| 647067 | 1232868. | | UUUGU | | 1232869.1 | | ACCCA | |
| .1 | 1 | | | | | | | |

### Example 2. In Vitro Screening of MARC1 siRNA

### Experimental Methods

[0624] Cell Culture and Transfections:

[0625] Hep3B Cells

[0626] Hep3B (ATCC) cells were transfected by adding 4.9 ul of Opti-MEM plus 0.1 ul of Lipofectamine RNAiMax per well (Invitrogen, Carlsbad Calif. cat #13778-150) to 5 ul of siRNA duplexes per well, with 4 replicates of each siRNA duplex, into a 384-well plate, and incubated at room temperature for 15 minutes. 40 ul of Eagle's Minimal Essential Medium (Life Tech) containing ˜5×10³ cells were then added to the siRNA mixture. Cells were incubated for 24 hours prior to RNA purification. Single dose experiments with exemplary human duplexes were performed at 50 nM.

[0627] Primary Mouse Hepatocytes

[0628] Primary mouse hepatocytes (PMHs) were transfected by adding 4.9 ul of Opti-MEM plus 0.1 ul of Lipofectamine RNAiMax per well (Invitrogen, Carlsbad Calif. cat #13778-150) to 5 ul of siRNA duplexes per well, with 4 replicates of each siRNA duplex, into a 384-well plate, and incubated at room temperature for 15 minutes. 40 ul of Eagle's Minimal Essential Medium (Life Tech) containing ˜5×10³ cells were then added to the siRNA mixture. Cells were incubated for 24 hours prior to RNA purification. Multidose experiments with exemplary mouse duplexes were performed at 10 nM, 1 nM, and 0.1 nM.

[0629] RNA Isolation:

[0630] RNA was isolated using an automated protocol on a BioTek-EL406 platform using DYNABEADs (Invitrogen, cat #61012). Briefly, 70 ul of Lysis/Binding Buffer and 10 ul of lysis buffer containing 3 ul of magnetic beads were added to the plate with cells. Plates were incubated on an electromagnetic shaker for 10 minutes at room temperature and then magnetic beads were captured and the supernatant was removed. Bead-bound RNA was then washed 2 times with 150 ul Wash Buffer A and once with Wash Buffer B. Beads were then washed with 150 ul Elution Buffer, re-captured and supernatant removed.

[0631] cDNA Synthesis:

[0632] cDNA was synthesized using ABI High capacity cDNA reverse transcription kit (Applied Biosystems, Foster City, Calif., Cat #4368813). 100 of a master mix containing 1 μl 10× Buffer, 0.4 μl 25×dNTPs, 1 ul 10× Random primers, 0.5 μl Reverse Transcriptase, 0.5 μl RNase inhibitor and 6.6 μl of H2O per reaction was added to RNA isolated above. Plates were sealed, mixed, and incubated on an electromagnetic shaker for 10 minutes at room temperature, followed by 2 h at 37° C.

[0633] Real Time PCR:

[0634] 2 μl of cDNA were added to a master mix containing 0.5 μl of a Human or Mouse GAPDH TaqMan Probe (4326317E), 0.5 of a Human and Mouse MARC1 probe, and 5 μl Lightcycler 480 probe master mix (Roche Cat #04887301001) per well in a 384 well plates (Roche cat #04887301001). Real time PCR was done in a LightCycler480 Real Time PCR system (Roche). Each duplex was tested at least four times and data were normalized to cells transfected with a non-targeting control siRNA. To calculate relative fold change, real time data were analyzed using the ΔΔCt method and normalized to assays performed with cells transfected with a non-targeting control siRNA.

[0635] Results:

[0636] The results of the single-dose screen in Hep3B cells transfected with MARC1 and treated with an exemplary set of human MARC1 siRNAs (as shown in Table 2A) are shown in Table 5. The single dose experiment was performed at a 50 nM, final duplex concentration and the data are expressed as percent message remaining relative to non-targeting control. Of the human siRNA duplexes evaluated at 50 nM, 8 achieved ≥90% knockdown of MARC1, 70 achieved ≥80% knockdown of MARC1, 184 achieved ≥60% knockdown of MARC1, 257 achieved ≥30% knockdown of MARC1, 270 achieved ≥20% knockdown of MARC1, and 285 achieved ≥10% knockdown of MARC1.

[0637] The results of the multi-dose screen in primary mouse hepatocytes transfected with MARC1 and treated with an exemplary set of mouse MARC1 siRNAs (as shown in Table 4A) are shown in Table 6. The multi-dose experiment was performed at a 10 nM, 1 nM, and 0.1 nM final duplex concentrations and the data are expressed as percent message remaining relative to non-targeting control. Of the mouse siRNA duplexes evaluated at 10 nM, 16 achieved ≥90% knockdown of MARC1, 20 achieved ≥80% knockdown of MARC1, 40 achieved ≥60% knockdown of MARC1, and 42 achieved ≥50% knockdown of MARC1. Of the mouse siRNA duplexes evaluated at 1 nM, 5 achieved ≥90% knockdown of MARC1, 8 achieved ≥80% knockdown of MARC1, 20 achieved ≥60% knockdown of MARC1, 37 achieved ≥30% knockdown of MARC1, 39 achieved ≥20% knockdown of MARC1, and 43 achieved ≥10% knockdown of MARC1. Of the mouse siRNA duplexes evaluated at 0.1 nM, 1 achieved ≥80% knockdown of MARC1, 5 achieved ≥60% knockdown of MARC1, 12 achieved ≥50% knockdown of MARC1, 26 achieved ≥30% knockdown of MARC1, 31 achieved ≥20% knockdown of MARC1, and 38 achieved ≥10% knockdown of MARC1.

TABLE 5
MARC1 in vitro single-dose screen with one
set of exemplary human MARC1 siRNA duplexes

| | % of Human MARC1 | |
|---|---|---|
| | Message Remaining | STDEV |
| Duplex Name* | 50 nM | 50 nM |
| AD-890263.1 | 6.3 | 1.5 |
| AD-890268.1 | 6.4 | 1.7 |
| AD-890427.1 | 8.0 | 2.8 |
| AD-890301.1 | 8.7 | 2.7 |
| AD-890300.1 | 9.2 | 0.5 |
| AD-890262.1 | 9.4 | 2.0 |
| AD-890186.1 | 9.6 | 0.1 |
| AD-890294.1 | 9.7 | 2.2 |
| AD-890275.1 | 10.1 | 1.0 |
| AD-890279.1 | 11.0 | 2.0 |
| AD-890202.1 | 11.1 | 1.2 |
| AD-890271.1 | 11.2 | 1.1 |
| AD-890309.1 | 11.2 | 1.8 |
| AD-890114.1 | 11.5 | 4.5 |
| AD-890411.1 | 11.6 | 1.6 |
| AD-890435.1 | 12.0 | 2.4 |
| AD-890185.1 | 12.6 | 3.3 |
| AD-890201.1 | 12.8 | 1.0 |
| AD-890307.1 | 13.5 | 2.9 |
| AD-890193.1 | 13.7 | 1.8 |
| AD-890341.1 | 14.2 | 2.3 |
| AD-890317.1 | 14.3 | 2.2 |
| AD-890316.1 | 14.3 | 2.3 |
| AD-890401.1 | 14.3 | 4.2 |
| AD-890247.1 | 14.4 | 0.6 |
| AD-890161.1 | 14.5 | 1.6 |
| AD-890447.1 | 14.6 | 2.5 |
| AD-890278.1 | 14.7 | 1.4 |
| AD-890396.1 | 14.7 | 5.1 |
| AD-890257.1 | 14.7 | 1.4 |
| AD-890410.1 | 14.8 | 1.9 |
| AD-890118.1 | 14.9 | 2.3 |
| AD-890171.1 | 14.9 | 2.1 |
| AD-890296.1 | 14.9 | 5.3 |
| AD-890388.1 | 15.3 | 1.4 |
| AD-890235.1 | 15.4 | 2.7 |
| AD-890393.1 | 15.6 | 4.9 |
| AD-890259.1 | 15.9 | 5.8 |
| AD-890385.1 | 16.0 | 4.1 |
| AD-890241.1 | 16.1 | 5.4 |
| AD-890408.1 | 16.5 | 2.1 |
| AD-890269.1 | 16.7 | 3.4 |
| AD-890270.1 | 16.7 | 2.6 |
| AD-890426.1 | 16.8 | 2.3 |
| AD-890231.1 | 16.8 | 2.3 |
| AD-890261.1 | 16.9 | 13.5 |
| AD-890431.1 | 17.1 | 4.4 |
| AD-890432.1 | 17.2 | 3.6 |
| AD-890277.1 | 17.3 | 2.8 |
| AD-890159.1 | 17.6 | 3.1 |
| AD-890237.1 | 18.0 | 2.4 |
| AD-890453.1 | 18.3 | 3.9 |
| AD-890200.1 | 18.3 | 2.3 |
| AD-890389.1 | 18.3 | 8.1 |
| AD-890433.1 | 18.4 | 3.0 |
| AD-890466.1 | 18.4 | 1.9 |
| AD-890430.1 | 18.5 | 2.1 |
| AD-890162.1 | 18.5 | 1.0 |
| AD-890295.1 | 18.5 | 9.2 |
| AD-890450.1 | 18.5 | 4.0 |
| AD-890343.1 | 18.6 | 3.3 |
| AD-890409.1 | 18.6 | 4.7 |
| AD-890448.1 | 19.3 | 1.4 |
| AD-890308.1 | 19.4 | 2.7 |
| AD-890236.1 | 19.4 | 8.6 |
| AD-890298.1 | 19.6 | 4.6 |
| AD-890163.1 | 19.7 | 1.7 |
| AD-890359.1 | 19.7 | 1.6 |
| AD-890203.1 | 19.8 | 1.4 |
| AD-890356.1 | 20.0 | 2.9 |
| AD-890272.1 | 20.1 | 4.4 |
| AD-890251.1 | 20.2 | 3.3 |
| AD-890434.1 | 20.3 | 6.6 |
| AD-890197.1 | 20.4 | 2.5 |
| AD-890126.1 | 20.5 | 3.3 |
| AD-890315.1 | 20.6 | 3.9 |
| AD-890449.1 | 20.6 | 4.1 |
| AD-890194.1 | 20.6 | 3.5 |
| AD-890451.1 | 20.7 | 1.9 |
| AD-890314.1 | 20.9 | 2.8 |
| AD-890455.1 | 20.9 | 2.6 |
| AD-890147.1 | 21.0 | 2.3 |
| AD-890246.1 | 21.3 | 3.6 |
| AD-890412.1 | 21.3 | 4.7 |
| AD-890332.1 | 21.6 | 3.7 |
| AD-890380.1 | 21.7 | 0.3 |
| AD-890400.1 | 21.7 | 0.4 |
| AD-890428.1 | 21.8 | 13.1 |
| AD-890322.1 | 21.8 | 2.4 |
| AD-890415.1 | 21.9 | 3.2 |
| AD-890386.1 | 22.0 | 4.4 |
| AD-890242.1 | 22.2 | 1.6 |
| AD-890264.1 | 22.3 | 3.5 |
| AD-890351.1 | 22.5 | 4.0 |
| AD-890172.1 | 22.7 | 11.3 |
| AD-890402.1 | 22.9 | 6.2 |
| AD-890169.1 | 23.3 | 3.5 |
| AD-890436.1 | 23.4 | 2.6 |
| AD-890327.1 | 23.4 | 2.6 |
| AD-890255.1 | 23.4 | 6.5 |
| AD-890313.1 | 23.5 | 2.5 |
| AD-890383.1 | 23.8 | 3.0 |
| AD-890421.1 | 23.8 | 4.0 |
| AD-890377.1 | 24.0 | 4.0 |
| AD-890336.1 | 24.1 | 2.9 |
| AD-890330.1 | 24.2 | 3.7 |
| AD-890344.1 | 24.3 | 4.4 |
| AD-890302.1 | 24.4 | 2.1 |
| AD-890240.1 | 24.7 | 7.1 |
| AD-890406.1 | 24.7 | 3.9 |
| AD-890392.1 | 24.7 | 3.4 |
| AD-890267.1 | 24.9 | 3.2 |
| AD-890360.1 | 25.1 | 3.2 |
| AD-890183.1 | 25.4 | 0.6 |
| AD-890439.1 | 25.5 | 4.2 |
| AD-890405.1 | 25.6 | 6.2 |
| AD-890337.1 | 25.7 | 6.8 |
| AD-890465.1 | 25.8 | 1.6 |
| AD-890228.1 | 25.8 | 3.0 |
| AD-890342.1 | 26.1 | 4.8 |
| AD-890361.1 | 26.3 | 3.9 |
| AD-890460.1 | 26.6 | 4.1 |
| AD-890362.1 | 26.7 | 1.3 |
| AD-890413.1 | 27.1 | 2.3 |
| AD-890387.1 | 27.2 | 3.3 |
| AD-890454.1 | 27.5 | 3.0 |
| AD-890335.1 | 27.5 | 5.1 |
| AD-890134.1 | 27.8 | 1.2 |
| AD-890358.1 | 27.9 | 3.8 |
| AD-890467.1 | 28.1 | 2.1 |
| AD-890399.1 | 28.1 | 13.1 |
| AD-890372.1 | 28.2 | 2.3 |
| AD-890142.1 | 28.4 | 8.2 |
| AD-890285.1 | 28.4 | 2.4 |
| AD-890461.1 | 28.4 | 1.9 |
| AD-890121.1 | 28.4 | 9.3 |
| AD-890304.1 | 28.6 | 6.7 |
| AD-890382.1 | 28.6 | 1.7 |
| AD-890363.1 | 28.6 | 3.1 |
| AD-890345.1 | 28.7 | 5.1 |
| AD-890407.1 | 28.8 | 6.0 |
| AD-890395.1 | 29.0 | 5.5 |
| AD-890429.1 | 29.2 | 5.5 |
| AD-890464.1 | 29.2 | 2.7 |
| AD-890331.1 | 29.4 | 4.1 |
| AD-890115.1 | 29.6 | 7.2 |
| AD-890338.1 | 29.6 | 3.0 |
| AD-890381.1 | 30.1 | 5.1 |
| AD-890378.1 | 30.1 | 4.5 |
| AD-890258.1 | 30.3 | 3.4 |
| AD-890329.1 | 30.4 | 5.0 |
| AD-890253.1 | 30.5 | 6.2 |
| AD-890397.1 | 30.8 | 6.2 |
| AD-890156.1 | 30.9 | 5.4 |
| AD-890137.1 | 31.2 | 8.4 |
| AD-890192.1 | 31.4 | 7.3 |
| AD-890404.1 | 31.7 | 4.5 |
| AD-890158.1 | 31.9 | 0.9 |
| AD-890310.1 | 32.0 | 2.5 |
| AD-890379.1 | 32.1 | 3.4 |
| AD-890145.1 | 32.1 | 5.9 |
| AD-890462.1 | 32.2 | 6.2 |
| AD-890256.1 | 32.3 | 5.3 |
| AD-890188.1 | 32.9 | 10.4 |
| AD-890445.1 | 33.0 | 3.1 |
| AD-890149.1 | 33.2 | 1.7 |
| AD-890168.1 | 33.4 | 7.5 |
| AD-890376.1 | 33.9 | 2.3 |
| AD-890291.1 | 33.9 | 2.8 |
| AD-890290.1 | 34.0 | 7.0 |
| AD-890353.1 | 34.1 | 1.6 |
| AD-890245.1 | 34.4 | 0.9 |
| AD-890468.1 | 34.8 | 1.8 |
| AD-890373.1 | 35.8 | 4.8 |
| AD-890152.1 | 36.1 | 4.4 |
| AD-890124.1 | 36.4 | 1.6 |
| AD-890252.1 | 36.5 | 4.2 |
| AD-890420.1 | 36.6 | 2.5 |
| AD-890199.1 | 37.2 | 2.7 |
| AD-890414.1 | 37.4 | 1.3 |
| AD-890463.1 | 37.6 | 6.3 |
| AD-890116.1 | 37.8 | 3.5 |
| AD-890318.1 | 38.3 | 3.7 |
| AD-890179.1 | 39.8 | 16.5 |
| AD-890141.1 | 40.1 | 18.6 |
| AD-890366.1 | 40.2 | 2.9 |
| AD-890457.1 | 40.5 | 2.8 |
| AD-890195.1 | 40.7 | 4.1 |
| AD-890326.1 | 40.8 | 2.6 |
| AD-890339.1 | 40.9 | 7.9 |
| AD-890166.1 | 41.0 | 2.9 |
| AD-890280.1 | 41.3 | 8.0 |
| AD-890260.1 | 41.5 | 8.2 |
| AD-890446.1 | 41.7 | 6.3 |
| AD-890287.1 | 42.0 | 22.2 |
| AD-890340.1 | 42.2 | 6.0 |
| AD-890352.1 | 42.5 | 5.7 |
| AD-890123.1 | 42.7 | 5.0 |
| AD-890357.1 | 42.8 | 4.1 |
| AD-890350.1 | 43.4 | 7.4 |
| AD-890390.1 | 43.4 | 6.0 |
| AD-890452.1 | 44.2 | 9.7 |
| AD-890139.1 | 44.5 | 2.4 |
| AD-890129.1 | 44.7 | 6.6 |
| AD-890320.1 | 44.9 | 8.3 |
| AD-890154.1 | 45.6 | 4.9 |
| AD-890213.1 | 45.7 | 7.8 |
| AD-890234.1 | 46.1 | 2.3 |
| AD-890266.1 | 46.4 | 7.3 |
| AD-890347.1 | 46.6 | 7.2 |
| AD-890321.1 | 46.9 | 8.2 |
| AD-890305.1 | 47.6 | 10.0 |
| AD-890160.1 | 48.6 | 6.2 |
| AD-890130.1 | 48.9 | 4.9 |
| AD-890215.1 | 49.0 | 24.5 |
| AD-890180.1 | 49.1 | 39.4 |
| AD-890469.1 | 49.5 | 4.5 |
| AD-890143.1 | 49.6 | 5.6 |
| AD-890306.1 | 49.6 | 5.2 |
| AD-890153.1 | 51.0 | 6.9 |
| AD-890403.1 | 51.0 | 6.3 |
| AD-890284.1 | 51.6 | 7.6 |
| AD-890157.1 | 51.7 | 5.8 |
| AD-890470.1 | 51.7 | 2.5 |
| AD-890187.1 | 52.0 | 6.1 |
| AD-890281.1 | 52.7 | 5.9 |
| AD-890425.1 | 53.0 | 6.3 |
| AD-890127.1 | 53.4 | 3.8 |
| AD-890238.1 | 54.1 | 4.3 |
| AD-890311.1 | 54.1 | 5.0 |
| AD-890355.1 | 54.9 | 6.1 |
| AD-890334.1 | 54.9 | 13.9 |
| AD-890144.1 | 55.0 | 9.3 |
| AD-890209.1 | 55.3 | 10.4 |
| AD-890375.1 | 55.3 | 3.5 |
| AD-890178.1 | 55.5 | 2.5 |
| AD-890254.1 | 55.6 | 8.1 |
| AD-890198.1 | 55.8 | 8.2 |
| AD-890239.1 | 57.4 | 21.3 |
| AD-890364.1 | 57.8 | 12.4 |
| AD-890214.1 | 58.6 | 28.7 |
| AD-890128.1 | 59.8 | 7.8 |
| AD-890250.1 | 60.0 | 8.0 |
| AD-890274.1 | 60.7 | 14.4 |
| AD-890288.1 | 61.6 | 14.1 |
| AD-890289.1 | 61.6 | 14.0 |
| AD-890312.1 | 61.7 | 2.4 |
| AD-890230.1 | 62.0 | 16.5 |
| AD-890146.1 | 62.1 | 3.9 |
| AD-890229.1 | 63.3 | 12.8 |
| AD-890349.1 | 63.8 | 6.4 |
| AD-890273.1 | 64.2 | 4.3 |
| AD-890210.1 | 65.9 | 17.4 |
| AD-890303.1 | 67.1 | 13.1 |
| AD-890122.1 | 67.9 | 10.3 |
| AD-890176.1 | 67.9 | 15.9 |
| AD-890423.1 | 68.2 | 7.5 |
| AD-890422.1 | 71.6 | 10.1 |
| AD-890196.1 | 72.5 | 5.7 |
| AD-890181.1 | 72.5 | 24.4 |
| AD-890384.1 | 73.4 | 1.7 |
| AD-890471.1 | 75.0 | 5.1 |
| AD-890293.1 | 75.4 | 6.7 |
| AD-890131.1 | 76.9 | 8.9 |
| AD-890189.1 | 77.2 | 13.9 |
| AD-890175.1 | 77.4 | 6.7 |
| AD-890164.1 | 77.5 | 7.4 |
| AD-890184.1 | 78.1 | 13.9 |
| AD-890206.1 | 78.5 | 4.1 |
| AD-890299.1 | 79.2 | 11.5 |
| AD-890177.1 | 80.5 | 10.1 |
| AD-890223.1 | 81.3 | 51.9 |
| AD-890212.1 | 81.7 | 40.3 |
| AD-890292.1 | 82.9 | 10.5 |
| AD-890132.1 | 83.5 | 11.0 |
| AD-890138.1 | 83.6 | 8.7 |
| AD-890441.1 | 83.7 | 5.4 |
| AD-890394.1 | 85.0 | 2.1 |
| AD-890458.1 | 85.2 | 5.7 |
| AD-890205.1 | 86.4 | 7.5 |
| AD-890276.1 | 87.0 | 7.6 |
| AD-890398.1 | 87.8 | 5.6 |
| AD-890365.1 | 87.9 | 6.2 |
| AD-890227.1 | 88.2 | 4.1 |
| AD-890133.1 | 89.7 | 5.0 |
| AD-890211.1 | 90.2 | 18.2 |
| AD-890286.1 | 91.2 | 24.4 |
| AD-890437.1 | 92.2 | 7.7 |
| AD-890416.1 | 93.0 | 8.8 |
| AD-890151.1 | 94.7 | 9.0 |
| AD-890440.1 | 95.3 | 5.6 |
| AD-890283.1 | 95.3 | 25.7 |
| AD-890333.1 | 95.3 | 6.5 |
| AD-890325.1 | 96.9 | 5.8 |
| AD-890265.1 | 98.1 | 19.4 |
| AD-890444.1 | 98.1 | 15.0 |
| AD-890282.1 | 99.9 | 10.4 |
| AD-890456.1 | 102.5 | 7.0 |
| AD-890417.1 | 103.0 | 10.1 |
| AD-890117.1 | 103.1 | 14.3 |
| AD-890323.1 | 103.1 | 9.1 |
| AD-890222.1 | 103.2 | 43.5 |
| AD-890136.1 | 103.3 | 14.0 |
| AD-890150.1 | 103.4 | 11.1 |
| AD-890226.1 | 104.0 | 11.5 |
| AD-890367.1 | 104.2 | 8.3 |
| AD-890191.1 | 104.9 | 18.2 |
| AD-890328.1 | 106.0 | 8.9 |
| AD-890232.1 | 106.2 | 3.8 |
| AD-890354.1 | 109.0 | 14.1 |
| AD-890208.1 | 109.5 | 25.9 |
| AD-890165.1 | 110.3 | 0.8 |
| AD-890204.1 | 111.3 | 6.9 |
| AD-890182.1 | 112.7 | 10.2 |
| AD-890324.1 | 114.0 | 9.1 |
| AD-890220.1 | 114.2 | 50.2 |
| AD-890148.1 | 115.2 | 21.6 |
| AD-890374.1 | 115.7 | 15.0 |
| AD-890348.1 | 115.7 | 10.8 |
| AD-890233.1 | 116.5 | 16.3 |
| AD-890369.1 | 118.4 | 17.8 |
| AD-890135.1 | 122.9 | 14.6 |
| AD-890119.1 | 123.3 | 20.0 |
| AD-890371.1 | 123.4 | 8.1 |
| AD-890424.1 | 125.2 | 9.6 |
| AD-890319.1 | 125.7 | 8.2 |
| AD-890125.1 | 127.0 | 22.0 |
| AD-890459.1 | 128.3 | 11.1 |
| AD-890391.1 | 129.8 | 10.1 |
| AD-890438.1 | 131.0 | 27.0 |
| AD-890368.1 | 132.5 | 12.4 |
| AD-890190.1 | 133.1 | 13.8 |
| AD-890167.1 | 133.6 | 20.5 |
| AD-890442.1 | 135.9 | 8.5 |
| AD-890170.1 | 137.2 | 13.8 |
| AD-890216.1 | 140.7 | 9.6 |
| AD-890140.1 | 142.6 | 13.9 |
| AD-890174.1 | 142.7 | 5.4 |
| AD-890173.1 | 143.5 | 10.0 |
| AD-890155.1 | 146.4 | 12.2 |
| AD-890370.1 | 148.9 | 15.7 |
| AD-890249.1 | 151.5 | 11.9 |
| AD-890219.1 | 154.7 | 17.4 |
| AD-890218.1 | 157.2 | 15.2 |
| AD-890217.1 | 158.3 | 22.0 |
| AD-890248.1 | 163.6 | 11.4 |
| AD-890346.1 | 164.5 | 15.3 |
| AD-890225.1 | 166.4 | 11.0 |
| AD-890221.1 | 168.7 | 35.2 |
| AD-890224.1 | 171.4 | 16.0 |
| AD-890243.1 | 178.1 | 17.3 |
| AD-890443.1 | 178.9 | 19.2 |

*(the number following the decimal point in a duplex name merely refers to a batch production number)

TABLE 6
MARC1 in vitro multi-dose screen with a set
of exemplary mouse MARC1 siRNA duplexes

| | % of Mouse | | % of Mouse | | % of Mouse | |
|---|---|---|---|---|---|---|
| | MARC1 | | MARC1 | | MARC1 | |
| | Message | | Message | | Message | |
| Duplex | Remaining | STDEV | Remaining | STDEV | Remaining | STDEV |
| Name* | 10 nM | 10 nM | 1 nM | 10 nM | 0.1 nM | 10 nM |
| AD-646719.1 | 21.8 | 10.4 | 32.5 | 7.1 | 42.5 | 8.3 |
| AD-646024.1 | 1.5 | 0.3 | 6.1 | 3.3 | 34.9 | 10.2 |
| AD-646025.1 | 1.4 | 0.4 | 6.1 | 1.6 | 40.0 | 8.9 |
| AD-646676.1 | 20.2 | 2.2 | 74.0 | 19.6 | 59.4 | 13.0 |
| AD-646683.1 | 18.4 | 6.5 | 53.8 | 13.3 | 61.8 | 27.1 |
| AD-646753.1 | 20.3 | 5.5 | 41.3 | 13.6 | 82.3 | 14.1 |
| AD-646154.1 | 3.2 | 1.8 | 24.7 | 6.0 | 68.1 | 7.6 |
| AD-646161.1 | 33.6 | 16.4 | 77.1 | 9.7 | 98.6 | 16.3 |
| AD-646675.1 | 23.4 | 2.8 | 45.7 | 4.6 | 77.8 | 7.6 |
| AD-646679.1 | 25.6 | 1.3 | 35.4 | 2.8 | 84.2 | 9.5 |
| AD-646681.1 | 26.5 | 2.2 | 38.7 | 11.1 | 76.0 | 4.9 |
| AD-646720.1 | 22.9 | 6.0 | 46.6 | 9.7 | 58.4 | 17.2 |
| AD-646752.1 | 27.5 | 3.0 | 32.4 | 3.5 | 36.5 | 15.6 |
| AD-646754.1 | 30.3 | 5.1 | 56.9 | 6.6 | 49.8 | 29.7 |
| AD-646027.1 | 5.9 | 0.9 | 54.1 | 17.4 | 67.8 | 12.0 |
| AD-646156.1 | 7.5 | 2.0 | 35.9 | 7.9 | 90.8 | 12.5 |
| AD-646160.1 | 39.1 | 6.2 | 66.1 | 10.0 | 79.5 | 15.6 |
| AD-646270.1 | 13.9 | 3.3 | 66.1 | 19.3 | 100.7 | 12.3 |
| AD-646677.1 | 46.1 | 8.3 | 86.3 | 13.6 | 75.9 | 34.5 |
| AD-646678.1 | 34.9 | 3.0 | 61.1 | 7.5 | 54.8 | 19.4 |
| AD-646712.1 | 31.2 | 3.2 | 33.5 | 3.2 | 57.0 | 13.0 |
| AD-646023.1 | 2.7 | 1.0 | 9.3 | 1.4 | 42.0 | 13.5 |
| AD-646152.1 | 34.4 | 6.9 | 86.4 | 8.4 | 46.6 | 28.2 |
| AD-646158.1 | 2.3 | 1.0 | 14.0 | 0.9 | 62.5 | 12.2 |
| AD-646164.1 | 7.2 | 1.7 | 51.0 | 15.9 | 83.0 | 20.5 |
| AD-646674.1 | 48.8 | 9.0 | 68.3 | 10.7 | 85.7 | 22.3 |
| AD-646682.1 | 29.3 | 2.8 | 46.7 | 11.6 | 54.9 | 23.7 |
| AD-647068.1 | 92.7 | 16.1 | 87.5 | 13.5 | 54.0 | 7.3 |
| AD-646026.1 | 4.5 | 1.9 | 35.9 | 3.1 | 63.4 | 4.4 |
| AD-646147.1 | 2.1 | 1.0 | 2.7 | 0.8 | 23.1 | 6.8 |
| AD-646151.1 | 2.3 | 0.7 | 15.8 | 1.0 | 66.8 | 17.0 |
| AD-646153.1 | 39.9 | 4.4 | 82.4 | 8.4 | 99.4 | 17.3 |
| AD-646162.1 | 3.9 | 1.3 | 30.9 | 3.1 | 87.0 | 21.5 |
| AD-646673.1 | 30.4 | 5.8 | 51.9 | 7.3 | 87.8 | 10.3 |
| AD-646707.1 | 27.3 | 2.2 | 41.7 | 5.1 | 58.6 | 13.5 |
| AD-646710.1 | 19.5 | 3.1 | 33.9 | 4.3 | 43.2 | 8.5 |
| AD-646711.1 | 24.1 | 5.5 | 42.3 | 1.8 | 46.1 | 3.8 |
| AD-646714.1 | 27.6 | 5.0 | 40.8 | 7.7 | 46.9 | 12.9 |
| AD-647066.1 | 104.2 | 14.2 | 96.4 | 13.2 | 118.9 | 19.6 |
| AD-646148.1 | 5.5 | 1.8 | 37.7 | 3.6 | 100.2 | 2.3 |
| AD-646155.1 | 3.1 | 1.0 | 26.4 | 4.1 | 91.2 | 16.3 |
| AD-646165.1 | 3.6 | 2.2 | 15.7 | 3.7 | 68.9 | 18.9 |
| AD-646268.1 | 15.2 | 1.2 | 60.0 | 13.0 | 85.1 | 30.0 |
| AD-646360.1 | 3.5 | 1.5 | 5.9 | 1.6 | 17.2 | 6.0 |
| AD-647067.1 | 91.8 | 24.2 | 100.7 | 14.5 | 73.7 | 24.3 |

(*the number following the decimal point in a duplex name merely refers to a batch production number)

### Example 3. In Vivo Screening of MARC1 siRNA

[0638] This experiment investigated the knockdown of MARC1 mRNA in the liver of mice post-injection of MARC1 siRNAs. The sequences and the chemistries of the MARC1 targeting siRNAs investigated in the murine model are depicted in FIG. 1.

### Experimental Methods

[0639] Wildtype B6/C57 mice (Charles Rivers Laboratory) were injected subcutaneously with 3 mg/kg of exemplary siRNAs (siRNA duplexes correspond to those in Table 4A and FIG. 1) or a PBS control. The treatment and control groups are shown in Table 8. On day 14 post-treatment, livers were harvested and cDNA was isolated for qPCR analysis with a probe specifically recognizing MARC1. The experimental design is summarized in FIG. 2.

TABLE 8
Treatment (siRNA duplexes) and control groups (PBS)
investigated in mice and doses administered

| | | Cage | Animal | Body weight | Dose |
|---|---|---|---|---|---|
| Treatment Group* | Dose | Number | Number | (g) | (μl) |
| PBS | N/A | 1 | 1-1 | 17.4 | 174 |
| | | | 1-2 | 18.3 | 183 |
| | | | 1-3 | 18.5 | 185 |
| AD-646025.2 | 3 mg/kg | 2 | 2-1 | 18.4 | 184 |
| | | | 2-2 | 19.4 | 194 |
| | | | 2-3 | 18.2 | 182 |
| AD-646147.2 | 3 mg/kg | 3 | 3-1 | 17.5 | 175 |
| | | | 3-2 | 18.7 | 187 |
| | | | 3-3 | 19 | 190 |
| AD-646158.2 | 3 mg/kg | 4 | 4-1 | 18 | 180 |
| | | | 4-2 | 18.5 | 185 |
| | | | 4-3 | 17.4 | 174 |
| AD-646151.2 | 3 mg/kg | 5 | 5-1 | 18.1 | 181 |
| | | | 5-2 | 19 | 190 |
| | | | 5-3 | 18.2 | 182 |
| AD-646154.2 | 3 mg/kg | 6 | 6-1 | 18.2 | 182 |
| | | | 6-2 | 17.8 | 178 |
| | | | 6-3 | 18.5 | 185 |
| AD-646360.2 | 3 mg/kg | 7 | 7-1 | 17.7 | 177 |
| | | | 7-2 | 17.3 | 173 |
| | | | 7-3 | 17.6 | 176 |
| AD-646165.2 | 3 mg/kg | 8 | 8-1 | 17.7 | 177 |
| | | | 8-2 | 19.4 | 194 |
| | | | 8-3 | 18 | 180 |

*(the number following the decimal point in a duplex name merely refers to a batch production number)

[0640] Results

[0641] Table 9 (siRNA duplexes correspond to siRNA sequences in Table 4A and FIG. 1) demonstrates the results of the in vivo screen. Of the siRNA duplexes evaluated, 1 achieved ≥70% knockdown of MARC1, 4 achieved ≥50% knockdown of MARC1, 6 achieved ≥40% knockdown of MARC1, and 7 achieved ≥20% knockdown of MARC1. AD-646025 and AD-646147 led to the greatest knock-down of MARC1 mRNA of the exemplary duplexes tested in mice.

TABLE 9
Efficacy and duration of exemplary MARC1 siRNAs in mice

| | |
|---|---|
| Duplex* | Day 14 post-treatment |

| (Administered | % of Mouse MARC1 | |
|---|---|---|
| at 3 mg/kg) | Message Remaining | STDEV |
| PBS | 103 | 0.33 |
| AD-646147.2 | 26 | 0.03 |
| AD-646025.2 | 42 | 0.02 |
| AD-646158.2 | 44 | 0.09 |
| AD-646360.2 | 48 | 0.06 |
| AD-646165.2 | 51 | 0.06 |
| AD-646151.2 | 54 | 0.27 |
| AD-646154.2 | 74 | 0.07 |

*(the number following the decimal point in a duplex name merely refers to a batch production number)

### Example 4. In Vivo Screening of MARC1 siRNA in a Nonalcoholic Steatohepatitis (NASH) Murine Model

[0642] This experiment investigates the effects of the exemplary murine MARC1 siRNAs, AD-646025 and AD-646147, on reversing the NASH phenotype in a High Fat High Fructose mouse model of NASH. An overview of the experimental design is depicted in FIG. 3.

### Experimental Methods

[0643] Wildtype, male C57BL/6J mice (Jackson Laboratory) were separated into two groups. The first group was fed a normal, chow diet (LFD) and the second group was fed a High Fat diet (60% kcal fat) with High Fructose (˜30% w/v) (HF/HFr diet). The weight of all mice in each group was monitored over time. After 12 weeks, mice fed the HF/HFr diet, were split into three treatment groups: siRNA AD-646025; siRNA AD-646147; and a PBS control. A control group of 6 mice fed the regular chow diet was also treated with PBS. Mice in each treatment and control group were injected subcutaneously with 10 mg/kg of their respective siRNA (siRNA AD-646025; siRNA AD-646147) or the PBS control. Dosing was performed biweekly, on weeks 13, 15, 17, and 19. Mice were weighed weekly. At 21 weeks, blood was drawn following a five-hour fast, using retro-orbital bleeding, and serum was isolated. Mice were euthanized and livers were weighed and collected for histology, cDNA isolation and qPCR analysis for MARC1 mRNA, as well as additional analyses (e.g., a Triglyceride (TG) assay or a free fatty acids assay (FFA)). Epididymal fat pads were also weighed.

### Results

[0644] The fold change in MARC1 mRNA in mice treated with the exemplary MARC1 targeting siRNA duplexes was measured by qPCR (FIG. 4A-4B). Mice on the HF/HFr, demonstrating a NASH phenotype, when treated with the AD-646147 siRNA duplex, demonstrated an 80% knock down of MARC1 mRNA, compared to mice on the HF/HFr diet that were treated with the PBS control (FIG. 4A). Further, mice on the HF/HFr diet that were treated with the AD-646025 siRNA duplex, demonstrated a 93% knockdown of MARC1 mRNA compared to the mice treated with the PBS control (FIG. 4B).

[0645] As shown in FIG. 5A, Body weight was measured across the different treatment groups at week 21. Body weight was similar across the treatment and control groups that were fed the HF/Hfr diet (NASH phenotype) but were higher than the weight of those mice fed the regular chow diet (FIG. 5A). The weight of the liver of each mouse following treatment with either a MARC1 targeting siRNA duplex or a PBS control was measured at week 21. Mice fed a HF/Hfr diet that were treated with the AD-646025 siRNA showed reduced liver weights following treatment as compared to the mice fed a HF/HFr diet and treated with the PBS control (FIG. 5B). The percentage of liver weight to body weight of each treated mouse was also calculated as shown in FIG. 5C. Mice fed the HF/Hfr diet that were treated with the AD-646025 siRNA also showed a reduced ratio of liver weight to body weight compared to the mice fed with a HF/HFr diet that were treated with the PBS control.

[0646] Serum levels (U/L) of the liver enzymes, alanine aminotransferase (ALT) (FIG. 6A), aspartate aminotransferase (AST) (FIG. 6B), and glutamate dehydrogenase (GLDH) (FIG. 6C) were also measured at week 21. Improvement in serum levels of ALT (FIG. 6A) and GLDH (FIG. 6C) were observed in mice fed the HF/HFr diet that were treated with the AD-646025 siRNA compared to mice fed the HF/HFr diet that were treated with the PBS control.

[0647] Serum alkaline phosphatase levels (ALP) and cholesterol levels were also measured (FIGS. 7A-7B, respectively). Treatment of mice fed a HF/HFr diet with the AD-646025 siRNA led to increased ALP levels (FIG. 7A) and a reduction in serum cholesterol (FIG. 7B), compared to mice fed a HF/HFr diet treated with a PBS control.

[0648] Finally, serum levels of triglycerides (TG) and free fatty acids (FFA) were measured in the mice across the different treatment groups (FIGS. 8A-8B). No differences were observed in the serum TG or FFA levels in mice fed the HF/HFr diet treated with either MARC1 siRNA duplex or a PBS control.

[0649] Taken together, these results demonstrated that MARC1 targeting siRNA duplexes can mitigate and reverse a nonalcoholic steatohepatitis (NASH) phenotype in a murine model.

We claim:

1. A double stranded ribonucleic acid (dsRNA) agent for inhibiting expression of a MARC1 gene, wherein the dsRNA agent comprises a sense strand and an antisense strand forming a double stranded region, wherein the antisense strand comprises a nucleotide sequence comprising at least 15, 17, 19, or 21 contiguous nucleotides, with 0, 1, 2, or 3 mismatches, from one of the antisense sequences listed in Table 2A 2B, 3A, 3B, 4A, or 4B.

2. The dsRNA agent of claim 1, wherein the sense strand comprises a nucleotide sequence comprising at least 15, 17, 19, or 21 contiguous nucleotides, with 0, 1, 2, or 3 mismatches, from a sense sequence listed in Table 2A, 2B, 3A, 3B, 4A, or 4B that corresponds to the antisense sequence.

3. The dsRNA agent of claim 1 or 2, wherein the dsRNA agent comprises at least one modified nucleotide.

4. The dsRNA agent of claim 3, wherein no more than five of the sense strand nucleotides and not more than five of the nucleotides of the antisense strand are unmodified nucleotides.

5. The dsRNA agent of claim 3, wherein all of the nucleotides of the sense strand and all of the nucleotides of the antisense strand comprise a modification.

6. The dsRNA agent of any one of claims 3-5, wherein at least one of the modified nucleotides is selected from the group consisting of a deoxy-nucleotide, a 3′-terminal deoxy-thymine (dT) nucleotide, a 2′-O-methyl modified nucleotide, a 2′-fluoro modified nucleotide, a 2′-deoxy-modified nucleotide, a locked nucleotide, an unlocked nucleotide, a conformationally restricted nucleotide, a constrained ethyl nucleotide, an abasic nucleotide, a 2′-amino-modified nucleotide, a 2′-O-allyl-modified nucleotide, 2′-C-alkyl-modified nucleotide, a 2′-methoxyethyl modified nucleotide, a 2′-O-alkyl-modified nucleotide, a morpholino nucleotide, a phosphoramidate, a non-natural base comprising nucleotide, a tetrahydropyran modified nucleotide, a 1,5-anhydrohexitol modified nucleotide, a cyclohexenyl modified nucleotide, a nucleotide comprising a phosphorothioate group, a nucleotide comprising a methylphosphonate group, a nucleotide comprising a 5′-phosphate, a nucleotide comprising a 5′-phosphate mimic, a glycol modified nucleotide, and a 2-O—(N-methylacetamide) modified nucleotide; and combinations thereof.

7. The dsRNA agent of any of the preceding claims, further comprising a ligand.

8. The dsRNA agent of claim 7, wherein the ligand is conjugated to the sense strand.

9. The dsRNA agent of claim 7 or 8, wherein the ligand is conjugated to the 3′ end or the 5′ end of the sense strand.

10. The dsRNA agent of claim 7 or 8, wherein the dsRNA agent is conjugated to the 3′ end of the sense strand.

11. The dsRNA agent of any one of claims 7-10, wherein the ligand comprises N-acetylgalactosamine (GalNAc).

12. The dsRNA agent of any one of claims 7-11, wherein the ligand is an N-acetylgalactosamine (GalNAc) derivative.

13. The dsRNA agent of claim 12, wherein the ligand is one or more GalNAc derivatives attached through a monovalent linker, or a bivalent, trivalent, or tetravalent branched linker.

14. The dsRNA agent of claim 12, wherein the ligand is

[chemical structure]

15. The dsRNA agent of claim 14, wherein the dsRNA agent is conjugated to the ligand as shown in the following schematic [chemical structure]
wherein X is O or S.

16. The dsRNA agent of claim 15, wherein the X is O.

17. The dsRNA agent of any of the preceding claims, wherein at least one strand comprises a 3′ overhang of at least 2 nucleotides.

18. The dsRNA agent of any of the preceding claims, wherein the double stranded region is 15-30 nucleotide pairs in length.

19. The dsRNA agent of claim 18, wherein the double stranded region is 17-23 nucleotide pairs in length.

20. The dsRNA agent of any of the preceding claims, wherein each strand has 19-30 nucleotides.

21. The dsRNA agent of any of the preceding claims, wherein the agent comprises at least one phosphorothioate or methylphosphonate internucleotide linkage.

22. A cell containing the dsRNA agent of any one of claims 1-21.

23. A pharmaceutical composition for inhibiting expression of a MARC1 gene, comprising the dsRNA agent of any one of claims 1-21.

24. A method of inhibiting expression of a MARC1 gene in a cell, the method comprising:
(a) contacting the cell with the dsRNA agent of any one of claims 1-21, or a pharmaceutical composition of claim 23; and
(b) maintaining the cell produced in step (a) for a time sufficient to reduce levels of MARC1 mRNA, MARC1 protein, or both of MARC1 mRNA and protein, thereby inhibiting expression of the MARC1 gene in the cell.

25. The method of claim 24, wherein the cell is within a subject.

26. The method of claim 25, wherein the subject is a human.

27. The method of claim 26, wherein the subject has been diagnosed with a metabolic disorder or hepatic fibrosis.

28. The method of claim 27, wherein the metabolic disorder is nonalcoholic fatty liver disease (NAFLD) or non-alcoholic steatohepatitis (NASH).

29. A method of treating a subject having or diagnosed with having a MARC1-associated disorder comprising administering to the subject a therapeutically effective amount of the dsRNA agent of any one of claims 1-21 or a pharmaceutical composition of claim 23, thereby treating the disorder.

30. The method of claim 29, wherein the MARC1-associated disorder is a metabolic disorder (e.g., nonalcoholic fatty liver disease (NAFLD) or non-alcoholic steatohepatitis (NASH)) or hepatic fibrosis.

31. A method of reducing serum cholesterol levels (e.g., total cholesterol levels, or LDL cholesterol levels) in a subject, comprising administering to the subject a therapeutically effective amount of the dsRNA agent of any one of claims 1-21 or a pharmaceutical composition of claim 23, thereby reducing serum cholesterol levels.

32. The method of any one of claims 25-31, wherein the dsRNA agent is administered to the subject intravenously.

The application's sequence listing, which the Patent Office published only in electronic form, follows.

SEQUENCE LISTING (4014 sequences)

SEQ ID NO: 1 - DNA, 2294 bp, Homo sapiens
acagcgccctgcagcgcaggcgacggaaggttgcagaggcagtggggcgccgaccaagtggaagctgagccaccacctcccactccccgcgccgccccccagaaggacgcactgctctgattggcccggaagggttcaggagctgcccagcctttgggctcggggccaaaggccgcaccttcccccagcggccccgggcgaccagcgcgctccggccttgccgccgccacctcgcggagaagccagccatgggcgccgccggctcctccgcgctggcgcgctttgtcctcctcgcgcaatcccggcccgggtggctcggggttgccgcgctgggcctgaccgcggtggcgctgggggctgtcgcctggcgccgcgcatggcccacgcggcgccggcggctgctgcagcaggtgggcacagtggcgcagctctggatctaccctgtgaaatcctgcaagggggtgccggtgagcgaggcggagtgcacggccatggggctgcgcagcggcaacctgcgggacaggttttggcttgtgatcaaccaggagggaaacatggttactgctcgccaggaacctcgcctggtcctgatttccctgacctgcgatggtgacaccctgactctcagtgcagcctacacaaaggacctactactgcctatcaaaacgcccaccacaaatgcagtgcacaagtgcagagtgcacggcctggagatagagggcagggactgtggcgaggccaccgcccagtggataaccagcttcctgaagtcacagccctaccgcctggtgcacttcgagcctcacatgcgaccgagacgtcctcatcaaatagcagacttgttccgacccaaggaccagattgcttactcagacaccagcccattcttgatcctttctgaggcgtcgctggcggatctcaactccaggctagagaagaaagttaaagcaaccaacttcaggcccaatattgtaatttcaggatgcgatgtctatgcagaggtaacactatgcccctttggatctttccttggatttgacttcttttttaaggattcttgggatgagcttcttattggtgacgtggaactgaaaagggtgatggcttgttccagatgcattttaaccacagtggacccagacaccggtgtcatgagcaggaaggaaccgctggaaacactgaagagttatcgccagtgtgacccttcagaacgaaagttatatggaaaatcaccactctttgggcagtattttgtgctggaaaacccagggaccatcaaagtgggagaccctgtgtacctgctgggccagtaatgggaaccgtatgtcctggaatattagatgccttttaaaaatgttctcaaaaatgacaacacttgaagcatggtgtttcagaactgagacctctacattttctttaaatttgtgattttcacatttttcgtcttttggacttctggtgtctcaatgcttcaatgtcccagtgcaaaaagtaaagaaatatagtctcaataacttagtaggacttcagtaagtcacttaaatgacaagacaggattctgaaaactccccgtttaactgattatggaatagttctttctcctgcttctccgtttatctaccaagagcgcagacttgcatcctgtcactaccactcgttagagaaagagaagaagagaaagaggaagagtgggtgggctggaagaatatcctagaatgtgttattgcccctgttcatgaggtacgcaatgaaaattaaattgcaccccaaatatggctggaatgccacttcccttttcttctcaagccccgggctagcttttgaaatggcataaagactgaggtgaccttcaggaagcactgcagatattaattttccatagatctggatctggccctgctgcttctcagacagcattggatttcctaaaggtgctcaggaggatggttgtgtagtcatggaggacccctggatccttgccattcccctcagctaatgacggagtgctccttctccagttccgggtgaaaaagttctgaattctgtggaggagaagaaaagtgattcagtgatttcagatagactactgaaaacctttaaagggggaaaaggaaagcatatgtcagttgtttaaaacccaatatctattttttaactgattgtataactctaagatctgatgaagtatattttttattgccattttgtcctttgattatattgggaagttgactaaacttgaaaaatgtttttaaaactgtgaataaatggaagctactttgactagtttcaga

SEQ ID NO: 2 - DNA, 2294 bp, Homo sapiens
tctgaaactagtcaaagtagcttccatttattcacagttttaaaaacatttttcaagtttagtcaacttcccaatataatcaaaggacaaaatggcaataaaaaatatacttcatcagatcttagagttatacaatcagttaaaaaatagatattgggttttaaacaactgacatatgctttccttttccccctttaaaggttttcagtagtctatctgaaatcactgaatcacttttcttctcctccacagaattcagaactttttcacccggaactggagaaggagcactccgtcattagctgaggggaatggcaaggatccaggggtcctccatgactacacaaccatcctcctgagcacctttaggaaatccaatgctgtctgagaagcagcagggccagatccagatctatggaaaattaatatctgcagtgcttcctgaaggtcacctcagtctttatgccatttcaaaagctagcccggggcttgagaagaaaagggaagtggcattccagccatatttggggtgcaatttaattttcattgcgtacctcatgaacaggggcaataacacattctaggatattcttccagcccacccactcttcctctttctcttcttctctttctctaacgagtggtagtgacaggatgcaagtctgcgctcttggtagataaacggagaagcaggagaaagaactattccataatcagttaaacggggagttttcagaatcctgtcttgtcatttaagtgacttactgaagtcctactaagttattgagactatatttctttactttttgcactgggacattgaagcattgagacaccagaagtccaaaagacgaaaaatgtgaaaatcacaaatttaaagaaaatgtagaggtctcagttctgaaacaccatgcttcaagtgttgtcatttttgagaacatttttaaaaggcatctaatattccaggacatacggttcccattactggcccagcaggtacacagggtctcccactttgatggtccctgggttttccagcacaaaatactgcccaaagagtggtgattttccatataactttcgttctgaagggtcacactggcgataactcttcagtgtttccagcggttccttcctgctcatgacaccggtgtctgggtccactgtggttaaaatgcatctggaacaagccatcacccttttcagttccacgtcaccaataagaagctcatcccaagaatccttaaaaaagaagtcaaatccaaggaaagatccaaaggggcatagtgttacctctgcatagacatcgcatcctgaaattacaatattgggcctgaagttggttgctttaactttcttctctagcctggagttgagatccgccagcgacgcctcagaaaggatcaagaatgggctggtgtctgagtaagcaatctggtccttgggtcggaacaagtctgctatttgatgaggacgtctcggtcgcatgtgaggctcgaagtgcaccaggcggtagggctgtgacttcaggaagctggttatccactgggcggtggcctcgccacagtccctgccctctatctccaggccgtgcactctgcacttgtgcactgcatttgtggtgggcgttttgataggcagtagtaggtcctttgtgtaggctgcactgagagtcagggtgtcaccatcgcaggtcagggaaatcaggaccaggcgaggttcctggcgagcagtaaccatgtttccctcctggttgatcacaagccaaaacctgtcccgcaggttgccgctgcgcagccccatggccgtgcactccgcctcgctcaccggcacccccttgcaggatttcacagggtagatccagagctgcgccactgtgcccacctgctgcagcagccgccggcgccgcgtgggccatgcgcggcgccaggcgacagcccccagcgccaccgcggtcaggcccagcgcggcaaccccgagccacccgggccgggattgcgcgaggaggacaaagcgcgccagcgcggaggagccggcggcgcccatggctggcttctccgcgaggtggcggcggcaaggccggagcgcgctggtcgcccggggccgctgggggaaggtgcggcctttggccccgagcccaaaggctgggcagctcctgaacccttccgggccaatcagagcagtgcgtccttctggggggcggcgcggggagtgggaggtggtggctcagcttccacttggtcggcgccccactgcctctgcaaccttccgtcgcctgcgctgcagggcgctgt

SEQ ID NO: 3 - DNA, 21 bp, Artificial Sequence
  source: /note="Description of Artificial Sequence: Synthetic oligonucleotide"
  source: /note="Description of Combined DNA/RNA Molecule: Synthetic oligonucleotide"
ccuucagaacgaaaguuautt

SEQ ID NO: 4 - DNA, 21 bp, Artificial Sequence
  source: /note="Description of Artificial Sequence: Synthetic oligonucleotide"
  source: /note="Description of Combined DNA/RNA Molecule: Synthetic oligonucleotide"
gaacgaaaguuauauggaatt

SEQ ID NO: 5 - DNA, 21 bp, Artificial Sequence
  source: /note="Description of Artificial Sequence: Synthetic oligonucleotide"
  source: /note="Description of Combined DNA/RNA Molecule: Synthetic oligonucleotide"
guuuaaaacccaauaucuatt

SEQ ID NO: 6 - DNA, 21 bp, Artificial Sequence
  source: /note="Description of Artificial Sequence: Synthetic oligonucleotide"
  source: /note="Description of Combined DNA/RNA Molecule: Synthetic oligonucleotide"
uauguccuggaauauuagatt

SEQ ID NO: 7 - DNA, 21 bp, Artificial Sequence
  source: /note="Description of Artificial Sequence: Synthetic oligonucleotide"
  source: /note="Description of Combined DNA/RNA Molecule: Synthetic oligonucleotide"
guauguccuggaauauuagtt

SEQ ID NO: 8 - DNA, 21 bp, Artificial Sequence
  source: /note="Description of Artificial Sequence: Synthetic oligonucleotide"
  source: /note="Description of Combined DNA/RNA Molecule: Synthetic oligonucleotide"
acccuucagaacgaaaguutt

SEQ ID NO: 9 - DNA, 21 bp, Artificial Sequence
  source: /note="Description of Artificial Sequence: Synthetic oligonucleotide"
  source: /note="Description of Combined DNA/RNA Molecule: Synthetic oligonucleotide"
gcccaauauuguaauuucatt

SEQ ID NO: 10 - DNA, 21 bp, Artificial Sequence
  source: /note="Description of Artificial Sequence: Synthetic oligonucleotide"
  source: /note="Description of Combined DNA/RNA Molecule: Synthetic oligonucleotide"
ggaccaucaaagugggagatt

SEQ ID NO: 11 - DNA, 21 bp, Artificial Sequence
  source: /note="Description of Artificial Sequence: Synthetic oligonucleotide"
  source: /note="Description of Combined DNA/RNA Molecule: Synthetic oligonucleotide"
aaucaccacucuuugggcatt

SEQ ID NO: 12 - DNA, 21 bp, Artificial Sequence
  source: /note="Description of Artificial Sequence: Synthetic oligonucleotide"
  source: /note="Description of Combined DNA/RNA Molecule: Synthetic oligonucleotide"
cucuuugggcaguauuuugtt

SEQ ID NO: 13 - DNA, 21 bp, Artificial Sequence
  source: /note="Description of Artificial Sequence: Synthetic oligonucleotide"
  source: /note="Description of Combined DNA/RNA Molecule: Synthetic oligonucleotide"
gaugcgaugucuaugcagatt

SEQ ID NO: 14 - DNA, 21 bp, Artificial Sequence
  source: /note="Description of Artificial Sequence: Synthetic oligonucleotide"
  source: /note="Description of Combined DNA/RNA Molecule: Synthetic oligonucleotide"
ggaaaaucaccacucuuugtt

SEQ ID NO: 15 - DNA, 21 bp, Artificial Sequence
  source: /note="Description of Artificial Sequence: Synthetic oligonucleotide"
  source: /note="Description of Combined DNA/RNA Molecule: Synthetic oligonucleotide"
aauguucucaaaaaugacatt

SEQ ID NO: 16 - DNA, 21 bp, Artificial Sequence
  source: /note="Description of Artificial Sequence: Synthetic oligonucleotide"
  source: /note="Description of Combined DNA/RNA Molecule: Synthetic oligonucleotide"
guuuuggcuugugaucaactt

SEQ ID NO: 17 - DNA, 21 bp, Artificial Sequence
  source: /note="Description of Artificial Sequence: Synthetic oligonucleotide"
  source: /note="Description of Combined DNA/RNA Molecule: Synthetic oligonucleotide"
agaagaaaagugauucagutt

SEQ ID NO: 18 - DNA, 21 bp, Artificial Sequence
  source: /note="Description of Artificial Sequence: Synthetic oligonucleotide"
  source: /note="Description of Combined DNA/RNA Molecule: Synthetic oligonucleotide"
ucugaugaaguauauuuuutt

SEQ ID NO: 19 - DNA, 21 bp, Artificial Sequence
  source: /note="Description of Artificial Sequence: Synthetic oligonucleotide"
  source: /note="Description of Combined DNA/RNA Molecule: Synthetic oligonucleotide"
ggcccaauauuguaauuuctt

SEQ ID NO: 20 - DNA, 21 bp, Artificial Sequence
  source: /note="Description of Artificial Sequence: Synthetic oligonucleotide"
  source: /note="Description of Combined DNA/RNA Molecule: Synthetic oligonucleotide"
ggaugcgaugucuaugcagtt

SEQ ID NO: 21 - DNA, 21 bp, Artificial Sequence
  source: /note="Description of Artificial Sequence: Synthetic oligonucleotide"
  source: /note="Description of Combined DNA/RNA Molecule: Synthetic oligonucleotide"
aaaauguucucaaaaaugatt

SEQ ID NO: 22 - DNA, 21 bp, Artificial Sequence
  source: /note="Description of Artificial Sequence: Synthetic oligonucleotide"
  source: /note="Description of Combined DNA/RNA Molecule: Synthetic oligonucleotide"
uguaauuucaggaugcgautt

SEQ ID NO: 23 - DNA, 21 bp, Artificial Sequence
  source: /note="Description of Artificial Sequence: Synthetic oligonucleotide"
  source: /note="Description of Combined DNA/RNA Molecule: Synthetic oligonucleotide"
aacugauuauggaauaguutt

SEQ ID NO: 24 - DNA, 21 bp, Artificial Sequence
  source: /note="Description of Artificial Sequence: Synthetic oligonucleotide"
  source: /note="Description of Combined DNA/RNA Molecule: Synthetic oligonucleotide"
cacuugaagcaugguguuutt

SEQ ID NO: 25 - DNA, 21 bp, Artificial Sequence
  source: /note="Description of Artificial Sequence: Synthetic oligonucleotide"
  source: /note="Description of Combined DNA/RNA Molecule: Synthetic oligonucleotide"
acacuugaagcaugguguutt

SEQ ID NO: 26 - DNA, 21 bp, Artificial Sequence
  source: /note="Description of Artificial Sequence: Synthetic oligonucleotide"
  source: /note="Description of Combined DNA/RNA Molecule: Synthetic oligonucleotide"
cauuccccucagcuaaugatt

SEQ ID NO: 27 - DNA, 21 bp, Artificial Sequence
  source: /note="Description of Artificial Sequence: Synthetic oligonucleotide"
  source: /note="Description of Combined DNA/RNA Molecule: Synthetic oligonucleotide"
gaaacacugaagaguuauctt

SEQ ID NO: 28 - DNA, 21 bp, Artificial Sequence
  source: /note="Description of Artificial Sequence: Synthetic oligonucleotide"
  source: /note="Description of Combined DNA/RNA Molecule: Synthetic oligonucleotide"
ggaccagauugcuuacucatt

SEQ ID NO: 29 - DNA, 21 bp, Artificial Sequence
  source: /note="Description of Artificial Sequence: Synthetic oligonucleotide"
  source: /note="Description of Combined DNA/RNA Molecule: Synthetic oligonucleotide"
gccauuuuguccuuugauutt

SEQ ID NO: 30 - DNA, 21 bp, Artificial Sequence
  source: /note="Description of Artificial Sequence: Synthetic oligonucleotide"
  source: /note="Description of Combined DNA/RNA Molecule: Synthetic oligonucleotide"
acucuuugggcaguauuuutt

SEQ ID NO: 31 - DNA, 21 bp, Artificial Sequence
  source: /note="Description of Artificial Sequence: Synthetic oligonucleotide"
  source: /note="Description of Combined DNA/RNA Molecule: Synthetic oligonucleotide"
cuaaaggugcucaggaggatt

SEQ ID NO: 32 - DNA, 21 bp, Artificial Sequence
  source: /note="Description of Artificial Sequence: Synthetic oligonucleotide"
  source: /note="Description of Combined DNA/RNA Molecule: Synthetic oligonucleotide"
gccagugugacccuucagatt

SEQ ID NO: 33 - DNA, 21 bp, Artificial Sequence
  source: /note="Description of Artificial Sequence: Synthetic oligonucleotide"
  source: /note="Description of Combined DNA/RNA Molecule: Synthetic oligonucleotide"
gagaagaaaagugauucagtt

SEQ ID NO: 34 - DNA, 21 bp, Artificial Sequence
  source: /note="Description of Artificial Sequence: Synthetic oligonucleotide"
  source: /note="Description of Combined DNA/RNA Molecule: Synthetic oligonucleotide"
caaccaggagggaaacaugtt

SEQ ID NO: 35 - DNA, 21 bp, Artificial Sequence
  source: /note="Description of Artificial Sequence: Synthetic oligonucleotide"
  source: /note="Description of Combined DNA/RNA Molecule: Synthetic oligonucleotide"
agagaagaaaguuaaagcatt

SEQ ID NO: 36 - DNA, 21 bp, Artificial Sequence
  source: /note="Description of Artificial Sequence: Synthetic oligonucleotide"
  source: /note="Description of Combined DNA/RNA Molecule: Synthetic oligonucleotide"
agugggagacccuguguactt

SEQ ID NO: 37 - DNA, 21 bp, Artificial Sequence
  source: /note="Description of Artificial Sequence: Synthetic oligonucleotide"
  source: /note="Description of Combined DNA/RNA Molecule: Synthetic oligonucleotide"
gcauuggauuuccuaaaggtt

SEQ ID NO: 38 - DNA, 21 bp, Artificial Sequence
  source: /note="Description of Artificial Sequence: Synthetic oligonucleotide"
  source: /note="Description of Combined DNA/RNA Molecule: Synthetic oligonucleotide"
ggcuuguuccagaugcauutt

SEQ ID NO: 39 - DNA, 21 bp, Artificial Sequence
  source: /note="Description of Artificial Sequence: Synthetic oligonucleotide"
  source: /note="Description of Combined DNA/RNA Molecule: Synthetic oligonucleotide"
ggauuuccuaaaggugcuctt

SEQ ID NO: 40 - DNA, 21 bp, Artificial Sequence
  source: /note="Description of Artificial Sequence: Synthetic oligonucleotide"
  source: /note="Description of Combined DNA/RNA Molecule: Synthetic oligonucleotide"
gugacccuucagaacgaaatt

SEQ ID NO: 41 - DNA, 21 bp, Artificial Sequence
  source: /note="Description of Artificial Sequence: Synthetic oligonucleotide"
  source: /note="Description of Combined DNA/RNA Molecule: Synthetic oligonucleotide"
cagacagcauuggauuucctt

SEQ ID NO: 42 - DNA, 21 bp, Artificial Sequence
  source: /note="Description of Artificial Sequence: Synthetic oligonucleotide"
  source: /note="Description of Combined DNA/RNA Molecule: Synthetic oligonucleotide"
gcauuuuaaccacaguggatt

SEQ ID NO: 43 - DNA, 21 bp, Artificial Sequence
  source: /note="Description of Artificial Sequence: Synthetic oligonucleotide"
  source: /note="Description of Combined DNA/RNA Molecule: Synthetic oligonucleotide"
gaggagaagaaaagugauutt

SEQ ID NO: 44 - DNA, 21 bp, Artificial Sequence
  source: /note="Description of Artificial Sequence: Synthetic oligonucleotide"
  source: /note="Description of Combined DNA/RNA Molecule: Synthetic oligonucleotide"
aaguuauauggaaaaucactt

SEQ ID NO: 45 - DNA, 21 bp, Artificial Sequence
  source: /note="Description of Artificial Sequence: Synthetic oligonucleotide"
  source: /note="Description of Combined DNA/RNA Molecule: Synthetic oligonucleotide"
aguuauauggaaaaucacctt

SEQ ID NO: 46 - DNA, 21 bp, Artificial Sequence
  source: /note="Description of Artificial Sequence: Synthetic oligonucleotide"
  source: /note="Description of Combined DNA/RNA Molecule: Synthetic oligonucleotide"
uguuuaaaacccaauaucutt

SEQ ID NO: 47 - DNA, 21 bp, Artificial Sequence
  source: /note="Description of Artificial Sequence: Synthetic oligonucleotide"
  source: /note="Description of Combined DNA/RNA Molecule: Synthetic oligonucleotide"
ucuuauuggugacguggaatt

SEQ ID NO: 48 - DNA, 21 bp, Artificial Sequence
  source: /note="Description of Artificial Sequence: Synthetic oligonucleotide"
  source: /note="Description of Combined DNA/RNA Molecule: Synthetic oligonucleotide"
gacccuucagaacgaaagutt

SEQ ID NO: 49 - DNA, 21 bp, Artificial Sequence
  source: /note="Description of Artificial Sequence: Synthetic oligonucleotide"
  source: /note="Description of Combined DNA/RNA Molecule: Synthetic oligonucleotide"
cucuaagaucugaugaagutt

SEQ ID NO: 50 - DNA, 21 bp, Artificial Sequence
  source: /note="Description of Artificial Sequence: Synthetic oligonucleotide"
  source: /note="Description of Combined DNA/RNA Molecule: Synthetic oligonucleotide"
uaagaucugaugaaguauatt

SEQ ID NO: 51 - DNA, 21 bp, Artificial Sequence
  source: /note="Description of Artificial Sequence: Synthetic oligonucleotide"
  source: /note="Description of Combined DNA/RNA Molecule: Synthetic oligonucleotide"
ucaccacucuuugggcagutt

SEQ ID NO: 52 - DNA, 21 bp, Artificial Sequence
  source: /note="Description of Artificial Sequence: Synthetic oligonucleotide"
  source: /note="Description of Combined DNA/RNA Molecule: Synthetic oligonucleotide"
ccaaggaccagauugcuuatt

SEQ ID NO: 53 - DNA, 21 bp, Artificial Sequence
  source: /note="Description of Artificial Sequence: Synthetic oligonucleotide"
  source: /note="Description of Combined DNA/RNA Molecule: Synthetic oligonucleotide"
guuccagaugcauuuuaactt

SEQ ID NO: 54 - DNA, 21 bp, Artificial Sequence
  source: /note="Description of Artificial Sequence: Synthetic oligonucleotide"
  source: /note="Description of Combined DNA/RNA Molecule: Synthetic oligonucleotide"
gacuaaacuugaaaaaugutt

SEQ ID NO: 55 - DNA, 21 bp, Artificial Sequence
  source: /note="Description of Artificial Sequence: Synthetic oligonucleotide"
  source: /note="Description of Combined DNA/RNA Molecule: Synthetic oligonucleotide"
aggaugcgaugucuaugcatt

SEQ ID NO: 56 - DNA, 21 bp, Artificial Sequence
  source: /note="Description of Artificial Sequence: Synthetic oligonucleotide"
  source: /note="Description of Combined DNA/RNA Molecule: Synthetic oligonucleotide"
cauuggauuuccuaaaggutt

SEQ ID NO: 57 - DNA, 21 bp, Artificial Sequence
  source: /note="Description of Artificial Sequence: Synthetic oligonucleotide"
  source: /note="Description of Combined DNA/RNA Molecule: Synthetic oligonucleotide"
gaucugaugaaguauauuutt

SEQ ID NO: 58 - DNA, 21 bp, Artificial Sequence
  source: /note="Description of Artificial Sequence: Synthetic oligonucleotide"
  source: /note="Description of Combined DNA/RNA Molecule: Synthetic oligonucleotide"
aaauggaagcuacuuugactt

SEQ ID NO: 59 - DNA, 21 bp, Artificial Sequence
  source: /note="Description of Artificial Sequence: Synthetic oligonucleotide"
  source: /note="Description of Combined DNA/RNA Molecule: Synthetic oligonucleotide"
acucuaagaucugaugaagtt

SEQ ID NO: 60 - DNA, 21 bp, Artificial Sequence
  source: /note="Description of Artificial Sequence: Synthetic oligonucleotide"
  source: /note="Description of Combined DNA/RNA Molecule: Synthetic oligonucleotide"
gaccagauugcuuacucagtt

SEQ ID NO: 61 - DNA, 21 bp, Artificial Sequence
  source: /note="Description of Artificial Sequence: Synthetic oligonucleotide"
  source: /note="Description of Combined DNA/RNA Molecule: Synthetic oligonucleotide"
gaccaucaaagugggagactt

SEQ ID NO: 62 - DNA, 21 bp, Artificial Sequence
  source: /note="Description of Artificial Sequence: Synthetic oligonucleotide"
  source: /note="Description of Combined DNA/RNA Molecule: Synthetic oligonucleotide"
gggaaguugacuaaacuugtt

SEQ ID NO: 63 - DNA, 21 bp, Artificial Sequence
  source: /note="Description of Artificial Sequence: Synthetic oligonucleotide"
  source: /note="Description of Combined DNA/RNA Molecule: Synthetic oligonucleotide"
cugauuauggaauaguucutt

SEQ ID NO: 64 - DNA, 21 bp, Artificial Sequence
  source: /note="Description of Artificial Sequence: Synthetic oligonucleotide"
  source: /note="Description of Combined DNA/RNA Molecule: Synthetic oligonucleotide"
aggagaagaaaagugauuctt

SEQ ID NO: 65 - DNA, 21 bp, Artificial Sequence
  source: /note="Description of Artificial Sequence: Synthetic oligonucleotide"
  source: /note="Description of Combined DNA/RNA Molecule: Synthetic oligonucleotide"
ccauuuuguccuuugauuatt

SEQ ID NO: 66 - DNA, 21 bp, Artificial Sequence
  source: /note="Description of Artificial Sequence: Synthetic oligonucleotide"
  source: /note="Description of Combined DNA/RNA Molecule: Synthetic oligonucleotide"
aaauguucucaaaaaugactt

SEQ ID NO: 67 - DNA, 21 bp, Artificial Sequence
  source: /note="Description of Artificial Sequence: Synthetic oligonucleotide"
  source: /note="Description of Combined DNA/RNA Molecule: Synthetic oligonucleotide"
uguuccagaugcauuuuaatt

SEQ ID NO: 68 - DNA, 21 bp, Artificial Sequence
  source: /note="Description of Artificial Sequence: Synthetic oligonucleotide"
  source: /note="Description of Combined DNA/RNA Molecule: Synthetic oligonucleotide"
cugggccaguaaugggaactt

SEQ ID NO: 69 - DNA, 21 bp, Artificial Sequence
  source: /note="Description of Artificial Sequence: Synthetic oligonucleotide"
  source: /note="Description of Combined DNA/RNA Molecule: Synthetic oligonucleotide"
accagauugcuuacucagatt

SEQ ID NO: 70 - DNA, 21 bp, Artificial Sequence
  source: /note="Description of Artificial Sequence: Synthetic oligonucleotide"
  source: /note="Description of Combined DNA/RNA Molecule: Synthetic oligonucleotide"
cgggcuagcuuuugaaaugtt

SEQ ID NO: 71 - DNA, 21 bp, Artificial Sequence
  source: /note="Description of Artificial Sequence: Synthetic oligonucleotide"
  source: /note="Description of Combined DNA/RNA Molecule: Synthetic oligonucleotide"
gcgaugucuaugcagaggutt

SEQ ID NO: 72 - DNA, 21 bp, Artificial Sequence
  source: /note="Description of Artificial Sequence: Synthetic oligonucleotide"
  source: /note="Description of Combined DNA/RNA Molecule: Synthetic oligonucleotide"
ccccgggcuagcuuuugaatt

SEQ ID NO: 73 - DNA, 21 bp, Artificial Sequence
  source: /note="Description of Artificial Sequence: Synthetic oligonucleotide"
  source: /note="Description of Combined DNA/RNA Molecule: Synthetic oligonucleotide"
gaaaaucaccacucuuuggtt

SEQ ID NO: 74 - DNA, 21 bp, Artificial Sequence
  source: /note="Description of Artificial Sequence: Synthetic oligonucleotide"
  source: /note="Description of Combined DNA/RNA Molecule: Synthetic oligonucleotide"
cacugaagaguuaucgccatt

SEQ ID NO: 75 - DNA, 21 bp, Artificial Sequence
  source: /note="Description of Artificial Sequence: Synthetic oligonucleotide"
  source: /note="Description of Combined DNA/RNA Molecule: Synthetic oligonucleotide"
aucugaugaaguauauuuutt

SEQ ID NO: 76 - DNA, 21 bp, Artificial Sequence
  source: /note="Description of Artificial Sequence: Synthetic oligonucleotide"
  source: /note="Description of Combined DNA/RNA Molecule: Synthetic oligonucleotide"
uucaggaugcgaugucuautt

SEQ ID NO: 77 - DNA, 21 bp, Artificial Sequence
  source: /note="Description of Artificial Sequence: Synthetic oligonucleotide"
  source: /note="Description of Combined DNA/RNA Molecule: Synthetic oligonucleotide"
gccugguccugauuucccutt

SEQ ID NO: 78 - DNA, 21 bp, Artificial Sequence
  source: /note="Description of Artificial Sequence: Synthetic oligonucleotide"
  source: /note="Description of Combined DNA/RNA Molecule: Synthetic oligonucleotide"
aacacuugaagcauggugutt

SEQ ID NO: 79 - DNA, 21 bp, Artificial Sequence
  source: /note="Description of Artificial Sequence: Synthetic oligonucleotide"
  source: /note="Description of Combined DNA/RNA Molecule: Synthetic oligonucleotide"
ugggaaguugacuaaacuutt

SEQ ID NO: 80 - DNA, 21 bp, Artificial Sequence
  source: /note="Description of Artificial Sequence: Synthetic oligonucleotide"
  source: /note="Description of Combined DNA/RNA Molecule: Synthetic oligonucleotide"
guaauuucaggaugcgaugtt

SEQ ID NO: 81 - DNA, 21 bp, Artificial Sequence
  source: /note="Description of Artificial Sequence: Synthetic oligonucleotide"
  source: /note="Description of Combined DNA/RNA Molecule: Synthetic oligonucleotide"
ggaaguugacuaaacuugatt

SEQ ID NO: 82 - DNA, 21 bp, Artificial Sequence
  source: /note="Description of Artificial Sequence: Synthetic oligonucleotide"
  source: /note="Description of Combined DNA/RNA Molecule: Synthetic oligonucleotide"
caacacuugaagcauggugtt

SEQ ID NO: 83 - DNA, 21 bp, Artificial Sequence
  source: /note="Description of Artificial Sequence: Synthetic oligonucleotide"
  source: /note="Description of Combined DNA/RNA Molecule: Synthetic oligonucleotide"
cuaaacuugaaaaauguuutt

SEQ ID NO: 84 - DNA, 21 bp, Artificial Sequence
  source: /note="Description of Artificial Sequence: Synthetic oligonucleotide"
  source: /note="Description of Combined DNA/RNA Molecule: Synthetic oligonucleotide"
cuucgagccucacaugcgatt

SEQ ID NO: 85 - DNA, 21 bp, Artificial Sequence
  source: /note="Description of Artificial Sequence: Synthetic oligonucleotide"
  source: /note="Description of Combined DNA/RNA Molecule: Synthetic oligonucleotide"
cuggaaacacugaagaguutt

SEQ ID NO: 86 - DNA, 21 bp, Artificial Sequence
  source: /note="Description of Artificial Sequence: Synthetic oligonucleotide"
  source: /note="Description of Combined DNA/RNA Molecule: Synthetic oligonucleotide"
gaagaaaagugauucagugtt

SEQ ID NO: 87 - DNA, 21 bp, Artificial Sequence
  source: /note="Description of Artificial Sequence: Synthetic oligonucleotide"
  source: /note="Description of Combined DNA/RNA Molecule: Synthetic oligonucleotide"
gucucaaugcuucaauguctt

SEQ ID NO: 88 - DNA, 21 bp, Artificial Sequence
  source: /note="Description of Artificial Sequence: Synthetic oligonucleotide"
  source: /note="Description of Combined DNA/RNA Molecule: Synthetic oligonucleotide"
cuucucagacagcauuggatt

SEQ ID NO: 89 - DNA, 21 bp, Artificial Sequence
  source: /note="Description of Artificial Sequence: Synthetic oligonucleotide"
  source: /note="Description of Combined DNA/RNA Molecule: Synthetic oligonucleotide"
gauccuugccauuccccuctt

SEQ ID NO: 90 - DNA, 21 bp, Artificial Sequence
  source: /note="Description of Artificial Sequence: Synthetic oligonucleotide"
  source: /note="Description of Combined DNA/RNA Molecule: Synthetic oligonucleotide"
uuuaaaacccaauaucuautt

SEQ ID NO: 91 - DNA, 21 bp, Artificial Sequence
  source: /note="Description of Artificial Sequence: Synthetic oligonucleotide"
  source: /note="Description of Combined DNA/RNA Molecule: Synthetic oligonucleotide"
ugguguuucagaacugagatt

SEQ ID NO: 92 - DNA, 21 bp, Artificial Sequence
  source: /note="Description of Artificial Sequence: Synthetic oligonucleotide"
  source: /note="Description of Combined DNA/RNA Molecule: Synthetic oligonucleotide"
agugauucagugauuucagtt

SEQ ID NO: 93 - DNA, 21 bp, Artificial Sequence
  source: /note="Description of Artificial Sequence: Synthetic oligonucleotide"
  source: /note="Description of Combined DNA/RNA Molecule: Synthetic oligonucleotide"
agacagcauuggauuuccutt

SEQ ID NO: 94 - DNA, 21 bp, Artificial Sequence
  source: /note="Description of Artificial Sequence: Synthetic oligonucleotide"
  source: /note="Description of Combined DNA/RNA Molecule: Synthetic oligonucleotide"
cauuuuaaccacaguggactt

SEQ ID NO: 95 - DNA, 21 bp, Artificial Sequence
  source: /note="Description of Artificial Sequence: Synthetic oligonucleotide"
  source: /note="Description of Combined DNA/RNA Molecule: Synthetic oligonucleotide"
uucagaacgaaaguuauautt

SEQ ID NO: 96 - DNA, 21 bp, Artificial Sequence
  source: /note="Description of Artificial Sequence: Synthetic oligonucleotide"
  source: /note="Description of Combined DNA/RNA Molecule: Synthetic oligonucleotide"
ggaauaguucuuucuccugtt

SEQ ID NO: 97 - DNA, 21 bp, Artificial Sequence
  source: /note="Description of Artificial Sequence: Synthetic oligonucleotide"
  source: /note="Description of Combined DNA/RNA Molecule: Synthetic oligonucleotide"
aguuaaagcaaccaacuuctt

SEQ ID NO: 98 - DNA, 21 bp, Artificial Sequence
  source: /note="Description of Artificial Sequence: Synthetic oligonucleotide"
  source: /note="Description of Combined DNA/RNA Molecule: Synthetic oligonucleotide"
auuccccucagcuaaugactt

SEQ ID NO: 99 - DNA, 21 bp, Artificial Sequence
  source: /note="Description of Artificial Sequence: Synthetic oligonucleotide"
  source: /note="Description of Combined DNA/RNA Molecule: Synthetic oligonucleotide"
cuagagaagaaaguuaaagtt

SEQ ID NO: 100 - DNA, 21 bp, Artificial Sequence
  source: /note="Description of Artificial Sequence: Synthetic oligonucleotide"
  source: /note="Description of Combined DNA/RNA Molecule: Synthetic oligonucleotide"
cugaugaaguauauuuuuutt

SEQ ID NO: 101 - DNA, 21 bp, Artificial Sequence
  source: /note="Description of Artificial Sequence: Synthetic oligonucleotide"
  source: /note="Description of Combined DNA/RNA Molecule: Synthetic oligonucleotide"
uugugauuuucacauuuuutt

SEQ ID NO: 102 - DNA, 21 bp, Artificial Sequence
  source: /note="Description of Artificial Sequence: Synthetic oligonucleotide"
  source: /note="Description of Combined DNA/RNA Molecule: Synthetic oligonucleotide"
gaguuaucgccagugugactt

SEQ ID NO: 103 - DNA, 21 bp, Artificial Sequence
  source: /note="Description of Artificial Sequence: Synthetic oligonucleotide"
  source: /note="Description of Combined DNA/RNA Molecule: Synthetic oligonucleotide"
gacaacacuugaagcauggtt

SEQ ID NO: 104 - DNA, 21 bp, Artificial Sequence
  source: /note="Description of Artificial Sequence: Synthetic oligonucleotide"
  source: /note="Description of Combined DNA/RNA Molecule: Synthetic oligonucleotide"
cucagacagcauuggauuutt

SEQ ID NO: 105 - DNA, 21 bp, Artificial Sequence
  source: /note="Description of Artificial Sequence: Synthetic oligonucleotide"
  source: /note="Description of Combined DNA/RNA Molecule: Synthetic oligonucleotide"
cuuuaaagggggaaaaggatt

SEQ ID NO: 106 - DNA, 21 bp, Artificial Sequence
  source: /note="Description of Artificial Sequence: Synthetic oligonucleotide"
  source: /note="Description of Combined DNA/RNA Molecule: Synthetic oligonucleotide"
ccauagaucuggaucuggctt

SEQ ID NO: 107 - DNA, 21 bp, Artificial Sequence
  source: /note="Description of Artificial Sequence: Synthetic oligonucleotide"
  source: /note="Description of Combined DNA/RNA Molecule: Synthetic oligonucleotide"
ugacaagacaggauucugatt

SEQ ID NO: 108 - DNA, 21 bp, Artificial Sequence
  source: /note="Description of Artificial Sequence: Synthetic oligonucleotide"
  source: /note="Description of Combined DNA/RNA Molecule: Synthetic oligonucleotide"
gugucucaaugcuucaaugtt

SEQ ID NO: 109 - DNA, 21 bp, Artificial Sequence
  source: /note="Description of Artificial Sequence: Synthetic oligonucleotide"
  source: /note="Description of Combined DNA/RNA Molecule: Synthetic oligonucleotide"
ugauuauggaauaguucuutt

SEQ ID NO: 110 - DNA, 21 bp, Artificial Sequence
  source: /note="Description of Artificial Sequence: Synthetic oligonucleotide"
  source: /note="Description of Combined DNA/RNA Molecule: Synthetic oligonucleotide"
auguccuggaauauuagautt

SEQ ID NO: 111 - DNA, 21 bp, Artificial Sequence
  source: /note="Description of Artificial Sequence: Synthetic oligonucleotide"
  source: /note="Description of Combined DNA/RNA Molecule: Synthetic oligonucleotide"
ccagaugcauuuuaaccactt

SEQ ID NO: 112 - DNA, 21 bp, Artificial Sequence
  source: /note="Description of Artificial Sequence: Synthetic oligonucleotide"
  source: /note="Description of Combined DNA/RNA Molecule: Synthetic oligonucleotide"
uggaggagaagaaaagugatt

SEQ ID NO: 113 - DNA, 21 bp, Artificial Sequence
  source: /note="Description of Artificial Sequence: Synthetic oligonucleotide"
  source: /note="Description of Combined DNA/RNA Molecule: Synthetic oligonucleotide"
uggauuuccuaaaggugcutt

SEQ ID NO: 114 - DNA, 21 bp, Artificial Sequence
  source: /note="Description of Artificial Sequence: Synthetic oligonucleotide"
  source: /note="Description of Combined DNA/RNA Molecule: Synthetic oligonucleotide"
agaacgaaaguuauauggatt

SEQ ID NO: 115 - DNA, 21 bp, Artificial Sequence
  source: /note="Description of Artificial Sequence: Synthetic oligonucleotide"
  source: /note="Description of Combined DNA/RNA Molecule: Synthetic oligonucleotide"
gggcuagcuuuugaaauggtt

SEQ ID NO: 116 - DNA, 21 bp, Artificial Sequence
  source: /note="Description of Artificial Sequence: Synthetic oligonucleotide"
  source: /note="Description of Combined DNA/RNA Molecule: Synthetic oligonucleotide"
caggcccaauauuguaauutt

SEQ ID NO: 117 - DNA, 21 bp, Artificial Sequence
  source: /note="Description of Artificial Sequence: Synthetic oligonucleotide"
  source: /note="Description of Combined DNA/RNA Molecule: Synthetic oligonucleotide"
aguauauuuuuuauugccatt

SEQ ID NO: 118 - DNA, 21 bp, Artificial Sequence
  source: /note="Description of Artificial Sequence: Synthetic oligonucleotide"
  source: /note="Description of Combined DNA/RNA Molecule: Synthetic oligonucleotide"
guggaggagaagaaaagugtt

SEQ ID NO: 119 - DNA, 21 bp, Artificial Sequence
  source: /note="Description of Artificial Sequence: Synthetic oligonucleotide"
  source: /note="Description of Combined DNA/RNA Molecule: Synthetic oligonucleotide"
gacaggauucugaaaacuctt

SEQ ID NO: 120 - DNA, 21 bp, Artificial Sequence
  source: /note="Description of Artificial Sequence: Synthetic oligonucleotide"
  source: /note="Description of Combined DNA/RNA Molecule: Synthetic oligonucleotide"
uaaauggaagcuacuuugatt

SEQ ID NO: 121 - DNA, 21 bp, Artificial Sequence
  source: /note="Description of Artificial Sequence: Synthetic oligonucleotide"
  source: /note="Description of Combined DNA/RNA Molecule: Synthetic oligonucleotide"
gcuucuuauuggugacgugtt

SEQ ID NO: 122 - DNA, 21 bp, Artificial Sequence
  source: /note="Description of Artificial Sequence: Synthetic oligonucleotide"
  source: /note="Description of Combined DNA/RNA Molecule: Synthetic oligonucleotide"
acugauuauggaauaguuctt

SEQ ID NO: 123 - DNA, 21 bp, Artificial Sequence
  source: /note="Description of Artificial Sequence: Synthetic oligonucleotide"
  source: /note="Description of Combined DNA/RNA Molecule: Synthetic oligonucleotide"
ggcuagcuuuugaaauggctt

SEQ ID NO: 124 - DNA, 21 bp, Artificial Sequence
  source: /note="Description of Artificial Sequence: Synthetic oligonucleotide"
  source: /note="Description of Combined DNA/RNA Molecule: Synthetic oligonucleotide"
aaaacugugaauaaauggatt

SEQ ID NO: 125 - DNA, 21 bp, Artificial Sequence
  source: /note="Description of Artificial Sequence: Synthetic oligonucleotide"
  source: /note="Description of Combined DNA/RNA Molecule: Synthetic oligonucleotide"
gcuagcuuuugaaauggcatt

SEQ ID NO: 126 - DNA, 21 bp, Artificial Sequence
  source: /note="Description of Artificial Sequence: Synthetic oligonucleotide"
  source: /note="Description of Combined DNA/RNA Molecule: Synthetic oligonucleotide"
agaaaagugauucagugautt

SEQ ID NO: 127 - DNA, 21 bp, Artificial Sequence
  source: /note="Description of Artificial Sequence: Synthetic oligonucleotide"
  source: /note="Description of Combined DNA/RNA Molecule: Synthetic oligonucleotide"
gacagcauuggauuuccuatt

SEQ ID NO: 128 - DNA, 21 bp, Artificial Sequence
  source: /note="Description of Artificial Sequence: Synthetic oligonucleotide"
  source: /note="Description of Combined DNA/RNA Molecule: Synthetic oligonucleotide"
acuaaacuugaaaaauguutt

SEQ ID NO: 129 - DNA, 21 bp, Artificial Sequence
  source: /note="Description of Artificial Sequence: Synthetic oligonucleotide"
  source: /note="Description of Combined DNA/RNA Molecule: Synthetic oligonucleotide"
aaugcuucaaugucccagutt

SEQ ID NO: 130 - DNA, 21 bp, Artificial Sequence
  source: /note="Description of Artificial Sequence: Synthetic oligonucleotide"
  source: /note="Description of Combined DNA/RNA Molecule: Synthetic oligonucleotide"
gugcagccuacacaaaggatt

SEQ ID NO: 131 - DNA, 21 bp, Artificial Sequence
  source: /note="Description of Artificial Sequence: Synthetic oligonucleotide"
  source: /note="Description of Combined DNA/RNA Molecule: Synthetic oligonucleotide"
ccgggcuagcuuuugaaautt

SEQ ID NO: 132 - DNA, 21 bp, Artificial Sequence
  source: /note="Description of Artificial Sequence: Synthetic oligonucleotide"
  source: /note="Description of Combined DNA/RNA Molecule: Synthetic oligonucleotide"
aauggaagcuacuuugacutt

SEQ ID NO: 133 - DNA, 21 bp, Artificial Sequence
  source: /note="Description of Artificial Sequence: Synthetic oligonucleotide"
  source: /note="Description of Combined DNA/RNA Molecule: Synthetic oligonucleotide"
ggauccuugccauuccccutt

SEQ ID NO: 134 - DNA, 21 bp, Artificial Sequence
  source: /note="Description of Artificial Sequence: Synthetic oligonucleotide"
  source: /note="Description of Combined DNA/RNA Molecule: Synthetic oligonucleotide"
aauuuuccauagaucuggatt

SEQ ID NO: 135 - DNA, 21 bp, Artificial Sequence
  source: /note="Description of Artificial Sequence: Synthetic oligonucleotide"
  source: /note="Description of Combined DNA/RNA Molecule: Synthetic oligonucleotide"
uggauaaccagcuuccugatt

SEQ ID NO: 136 - DNA, 21 bp, Artificial Sequence
  source: /note="Description of Artificial Sequence: Synthetic oligonucleotide"
  source: /note="Description of Combined DNA/RNA Molecule: Synthetic oligonucleotide"
gggcaguauuuugugcuggtt

SEQ ID NO: 137 - DNA, 21 bp, Artificial Sequence
  source: /note="Description of Artificial Sequence: Synthetic oligonucleotide"
  source: /note="Description of Combined DNA/RNA Molecule: Synthetic oligonucleotide"
aaacugugaauaaauggaatt

SEQ ID NO: 138 - DNA, 21 bp, Artificial Sequence
  source: /note="Description of Artificial Sequence: Synthetic oligonucleotide"
  source: /note="Description of Combined DNA/RNA Molecule: Synthetic oligonucleotide"
caggagggaaacaugguuatt

SEQ ID NO: 139 - DNA, 21 bp, Artificial Sequence
  source: /note="Description of Artificial Sequence: Synthetic oligonucleotide"
  source: /note="Description of Combined DNA/RNA Molecule: Synthetic oligonucleotide"
guccuggaauauuagaugctt

SEQ ID NO: 140 - DNA, 21 bp, Artificial Sequence
  source: /note="Description of Artificial Sequence: Synthetic oligonucleotide"
  source: /note="Description of Combined DNA/RNA Molecule: Synthetic oligonucleotide"
ucucagacagcauuggauutt

SEQ ID NO: 141 - DNA, 21 bp, Artificial Sequence
  source: /note="Description of Artificial Sequence: Synthetic oligonucleotide"
  source: /note="Description of Combined DNA/RNA Molecule: Synthetic oligonucleotide"
gacugaggugaccuucaggtt

SEQ ID NO: 142 - DNA, 21 bp, Artificial Sequence
  source: /note="Description of Artificial Sequence: Synthetic oligonucleotide"
  source: /note="Description of Combined DNA/RNA Molecule: Synthetic oligonucleotide"
gauuauggaauaguucuuutt

SEQ ID NO: 143 - DNA, 21 bp, Artificial Sequence
  source: /note="Description of Artificial Sequence: Synthetic oligonucleotide"
  source: /note="Description of Combined DNA/RNA Molecule: Synthetic oligonucleotide"
ggaggagaagaaaagugautt

SEQ ID NO: 144 - DNA, 21 bp, Artificial Sequence
  source: /note="Description of Artificial Sequence: Synthetic oligonucleotide"
  source: /note="Description of Combined DNA/RNA Molecule: Synthetic oligonucleotide"
ccuaaaggugcucaggaggtt

SEQ ID NO: 145 - DNA, 21 bp, Artificial Sequence
  source: /note="Description of Artificial Sequence: Synthetic oligonucleotide"
  source: /note="Description of Combined DNA/RNA Molecule: Synthetic oligonucleotide"
auaacucuaagaucugaugtt

SEQ ID NO: 146 - DNA, 21 bp, Artificial Sequence
  source: /note="Description of Artificial Sequence: Synthetic oligonucleotide"
  source: /note="Description of Combined DNA/RNA Molecule: Synthetic oligonucleotide"
auaaauggaagcuacuuugtt

SEQ ID NO: 147 - DNA, 21 bp, Artificial Sequence
  source: /note="Description of Artificial Sequence: Synthetic oligonucleotide"
  source: /note="Description of Combined DNA/RNA Molecule: Synthetic oligonucleotide"
ugucucaaugcuucaaugutt

SEQ ID NO: 148 - DNA, 21 bp, Artificial Sequence
  source: /note="Description of Artificial Sequence: Synthetic oligonucleotide"
  source: /note="Description of Combined DNA/RNA Molecule: Synthetic oligonucleotide"
uggcuugugaucaaccaggtt

SEQ ID NO: 149 - DNA, 21 bp, Artificial Sequence
  source: /note="Description of Artificial Sequence: Synthetic oligonucleotide"
  source: /note="Description of Combined DNA/RNA Molecule: Synthetic oligonucleotide"
acaggauucugaaaacucctt

SEQ ID NO: 150 - DNA, 21 bp, Artificial Sequence
  source: /note="Description of Artificial Sequence: Synthetic oligonucleotide"
  source: /note="Description of Combined DNA/RNA Molecule: Synthetic oligonucleotide"
uucucagacagcauuggautt

SEQ ID NO: 151 - DNA, 21 bp, Artificial Sequence
  source: /note="Description of Artificial Sequence: Synthetic oligonucleotide"
  source: /note="Description of Combined DNA/RNA Molecule: Synthetic oligonucleotide"
cauagaucuggaucuggcctt

SEQ ID NO: 152 - DNA, 21 bp, Artificial Sequence
  source: /note="Description of Artificial Sequence: Synthetic oligonucleotide"
  source: /note="Description of Combined DNA/RNA Molecule: Synthetic oligonucleotide"
agugugacccuucagaacgtt

SEQ ID NO: 153 - DNA, 21 bp, Artificial Sequence
  source: /note="Description of Artificial Sequence: Synthetic oligonucleotide"
  source: /note="Description of Combined DNA/RNA Molecule: Synthetic oligonucleotide"
gugauuuucacauuuuucgtt

SEQ ID NO: 154 - DNA, 21 bp, Artificial Sequence
  source: /note="Description of Artificial Sequence: Synthetic oligonucleotide"
  source: /note="Description of Combined DNA/RNA Molecule: Synthetic oligonucleotide"
cugaagaguuaucgccagutt

SEQ ID NO: 155 - DNA, 21 bp, Artificial Sequence
  source: /note="Description of Artificial Sequence: Synthetic oligonucleotide"
  source: /note="Description of Combined DNA/RNA Molecule: Synthetic oligonucleotide"
ccccuggauccuugccauutt

SEQ ID NO: 156 - DNA, 21 bp, Artificial Sequence
  source: /note="Description of Artificial Sequence: Synthetic oligonucleotide"
  source: /note="Description of Combined DNA/RNA Molecule: Synthetic oligonucleotide"
gacccaaggaccagauugctt

SEQ ID NO: 157 - DNA, 21 bp, Artificial Sequence
  source: /note="Description of Artificial Sequence: Synthetic oligonucleotide"
  source: /note="Description of Combined DNA/RNA Molecule: Synthetic oligonucleotide"
aacgcccaccacaaaugcatt

SEQ ID NO: 158 - DNA, 21 bp, Artificial Sequence
  source: /note="Description of Artificial Sequence: Synthetic oligonucleotide"
  source: /note="Description of Combined DNA/RNA Molecule: Synthetic oligonucleotide"
uuguaauuucaggaugcgatt

SEQ ID NO: 159 - DNA, 21 bp, Artificial Sequence
  source: /note="Description of Artificial Sequence: Synthetic oligonucleotide"
  source: /note="Description of Combined DNA/RNA Molecule: Synthetic oligonucleotide"
gugcuccuucuccaguucctt

SEQ ID NO: 160 - DNA, 21 bp, Artificial Sequence
  source: /note="Description of Artificial Sequence: Synthetic oligonucleotide"
  source: /note="Description of Combined DNA/RNA Molecule: Synthetic oligonucleotide"
cccaaggaccagauugcuutt

SEQ ID NO: 161 - DNA, 21 bp, Artificial Sequence
  source: /note="Description of Artificial Sequence: Synthetic oligonucleotide"
  source: /note="Description of Combined DNA/RNA Molecule: Synthetic oligonucleotide"
aaaaugacaacacuugaagtt

SEQ ID NO: 162 - DNA, 21 bp, Artificial Sequence
  source: /note="Description of Artificial Sequence: Synthetic oligonucleotide"
  source: /note="Description of Combined DNA/RNA Molecule: Synthetic oligonucleotide"
gcuucucagacagcauuggtt

SEQ ID NO: 163 - DNA, 21 bp, Artificial Sequence
  source: /note="Description of Artificial Sequence: Synthetic oligonucleotide"
  source: /note="Description of Combined DNA/RNA Molecule: Synthetic oligonucleotide"
agcuuccugaagucacagctt

SEQ ID NO: 164 - DNA, 21 bp, Artificial Sequence
  source: /note="Description of Artificial Sequence: Synthetic oligonucleotide"
  source: /note="Description of Combined DNA/RNA Molecule: Synthetic oligonucleotide"
aacugugaauaaauggaagtt

SEQ ID NO: 165 - DNA, 21 bp, Artificial Sequence
  source: /note="Description of Artificial Sequence: Synthetic oligonucleotide"
  source: /note="Description of Combined DNA/RNA Molecule: Synthetic oligonucleotide"
aguuaucgccagugugacctt

SEQ ID NO: 166 - DNA, 21 bp, Artificial Sequence
  source: /note="Description of Artificial Sequence: Synthetic oligonucleotide"
  source: /note="Description of Combined DNA/RNA Molecule: Synthetic oligonucleotide"
ccaauauuguaauuucaggtt

SEQ ID NO: 167 - DNA, 21 bp, Artificial Sequence
  source: /note="Description of Artificial Sequence: Synthetic oligonucleotide"
  source: /note="Description of Combined DNA/RNA Molecule: Synthetic oligonucleotide"
uuauugccauuuuguccuutt

SEQ ID NO: 168 - DNA, 21 bp, Artificial Sequence
  source: /note="Description of Artificial Sequence: Synthetic oligonucleotide"
  source: /note="Description of Combined DNA/RNA Molecule: Synthetic oligonucleotide"
caaauagcagacuuguucctt

SEQ ID NO: 169 - DNA, 21 bp, Artificial Sequence
  source: /note="Description of Artificial Sequence: Synthetic oligonucleotide"
  source: /note="Description of Combined DNA/RNA Molecule: Synthetic oligonucleotide"
uccuuucugaggcgucgcutt

SEQ ID NO: 170 - DNA, 21 bp, Artificial Sequence
  source: /note="Description of Artificial Sequence: Synthetic oligonucleotide"
  source: /note="Description of Combined DNA/RNA Molecule: Synthetic oligonucleotide"
uccauagaucuggaucuggtt

SEQ ID NO: 171 - DNA, 21 bp, Artificial Sequence
  source: /note="Description of Artificial Sequence: Synthetic oligonucleotide"
  source: /note="Description of Combined DNA/RNA Molecule: Synthetic oligonucleotide"
cagggaccaucaaagugggtt

SEQ ID NO: 172 - DNA, 21 bp, Artificial Sequence
  source: /note="Description of Artificial Sequence: Synthetic oligonucleotide"
  source: /note="Description of Combined DNA/RNA Molecule: Synthetic oligonucleotide"
ccagggaccaucaaaguggtt

SEQ ID NO: 173 - DNA, 21 bp, Artificial Sequence
  source: /note="Description of Artificial Sequence: Synthetic oligonucleotide"
  source: /note="Description of Combined DNA/RNA Molecule: Synthetic oligonucleotide"
agaaagaggaagagugggutt

SEQ ID NO: 174 - DNA, 21 bp, Artificial Sequence
  source: /note="Description of Artificial Sequence: Synthetic oligonucleotide"
  source: /note="Description of Combined DNA/RNA Molecule: Synthetic oligonucleotide"
gcuggaaacacugaagagutt

SEQ ID NO: 175 - DNA, 21 bp, Artificial Sequence
  source: /note="Description of Artificial Sequence: Synthetic oligonucleotide"
  source: /note="Description of Combined DNA/RNA Molecule: Synthetic oligonucleotide"
auggaagcuacuuugacuatt

SEQ ID NO: 176 - DNA, 21 bp, Artificial Sequence
  source: /note="Description of Artificial Sequence: Synthetic oligonucleotide"
  source: /note="Description of Combined DNA/RNA Molecule: Synthetic oligonucleotide"
auuuuccauagaucuggautt

SEQ ID NO: 177 - DNA, 21 bp, Artificial Sequence
  source: /note="Description of Artificial Sequence: Synthetic oligonucleotide"
  source: /note="Description of Combined DNA/RNA Molecule: Synthetic oligonucleotide"
auagcagacuuguuccgactt

SEQ ID NO: 178 - DNA, 21 bp, Artificial Sequence
  source: /note="Description of Artificial Sequence: Synthetic oligonucleotide"
  source: /note="Description of Combined DNA/RNA Molecule: Synthetic oligonucleotide"
cucgccugguccugauuuctt

SEQ ID NO: 179 - DNA, 21 bp, Artificial Sequence
  source: /note="Description of Artificial Sequence: Synthetic oligonucleotide"
  source: /note="Description of Combined DNA/RNA Molecule: Synthetic oligonucleotide"
acugaagaguuaucgccagtt

SEQ ID NO: 180 - DNA, 21 bp, Artificial Sequence
  source: /note="Description of Artificial Sequence: Synthetic oligonucleotide"
  source: /note="Description of Combined DNA/RNA Molecule: Synthetic oligonucleotide"
gaaaaccuuuaaagggggatt

SEQ ID NO: 181 - DNA, 21 bp, Artificial Sequence
  source: /note="Description of Artificial Sequence: Synthetic oligonucleotide"
  source: /note="Description of Combined DNA/RNA Molecule: Synthetic oligonucleotide"
caggaugcgaugucuaugctt

SEQ ID NO: 182 - DNA, 21 bp, Artificial Sequence
  source: /note="Description of Artificial Sequence: Synthetic oligonucleotide"
  source: /note="Description of Combined DNA/RNA Molecule: Synthetic oligonucleotide"
aaagugauucagugauuuctt

SEQ ID NO: 183 - DNA, 21 bp, Artificial Sequence
  source: /note="Description of Artificial Sequence: Synthetic oligonucleotide"
  source: /note="Description of Combined DNA/RNA Molecule: Synthetic oligonucleotide"
acugugaauaaauggaagctt

SEQ ID NO: 184 - DNA, 21 bp, Artificial Sequence
  source: /note="Description of Artificial Sequence: Synthetic oligonucleotide"
  source: /note="Description of Combined DNA/RNA Molecule: Synthetic oligonucleotide"
cuugugaucaaccaggaggtt

SEQ ID NO: 185 - DNA, 21 bp, Artificial Sequence
  source: /note="Description of Artificial Sequence: Synthetic oligonucleotide"
  source: /note="Description of Combined DNA/RNA Molecule: Synthetic oligonucleotide"
acuugaagcaugguguuuctt

SEQ ID NO: 186 - DNA, 21 bp, Artificial Sequence
  source: /note="Description of Artificial Sequence: Synthetic oligonucleotide"
  source: /note="Description of Combined DNA/RNA Molecule: Synthetic oligonucleotide"
acuucaggcccaauauugutt

SEQ ID NO: 187 - DNA, 21 bp, Artificial Sequence
  source: /note="Description of Artificial Sequence: Synthetic oligonucleotide"
  source: /note="Description of Combined DNA/RNA Molecule: Synthetic oligonucleotide"
guggauaaccagcuuccugtt

SEQ ID NO: 188 - DNA, 21 bp, Artificial Sequence
  source: /note="Description of Artificial Sequence: Synthetic oligonucleotide"
  source: /note="Description of Combined DNA/RNA Molecule: Synthetic oligonucleotide"
gaggugaccuucaggaagctt

SEQ ID NO: 189 - DNA, 21 bp, Artificial Sequence
  source: /note="Description of Artificial Sequence: Synthetic oligonucleotide"
  source: /note="Description of Combined DNA/RNA Molecule: Synthetic oligonucleotide"
aauguuuuuaaaacugugatt

SEQ ID NO: 190 - DNA, 21 bp, Artificial Sequence
  source: /note="Description of Artificial Sequence: Synthetic oligonucleotide"
  source: /note="Description of Combined DNA/RNA Molecule: Synthetic oligonucleotide"
uaauuucaggaugcgaugutt

SEQ ID NO: 191 - DNA, 21 bp, Artificial Sequence
  source: /note="Description of Artificial Sequence: Synthetic oligonucleotide"
  source: /note="Description of Combined DNA/RNA Molecule: Synthetic oligonucleotide"
uaaauuugugauuuucacatt

SEQ ID NO: 192 - DNA, 21 bp, Artificial Sequence
  source: /note="Description of Artificial Sequence: Synthetic oligonucleotide"
  source: /note="Description of Combined DNA/RNA Molecule: Synthetic oligonucleotide"
guuuaacugauuauggaautt

SEQ ID NO: 193 - DNA, 21 bp, Artificial Sequence
  source: /note="Description of Artificial Sequence: Synthetic oligonucleotide"
  source: /note="Description of Combined DNA/RNA Molecule: Synthetic oligonucleotide"
gauccuuucugaggcgucgtt

SEQ ID NO: 194 - DNA, 21 bp, Artificial Sequence
  source: /note="Description of Artificial Sequence: Synthetic oligonucleotide"
  source: /note="Description of Combined DNA/RNA Molecule: Synthetic oligonucleotide"
ucuuugggcaguauuuugutt

SEQ ID NO: 195 - DNA, 21 bp, Artificial Sequence
  source: /note="Description of Artificial Sequence: Synthetic oligonucleotide"
  source: /note="Description of Combined DNA/RNA Molecule: Synthetic oligonucleotide"
ugacccuucagaacgaaagtt

SEQ ID NO: 196 - DNA, 21 bp, Artificial Sequence
  source: /note="Description of Artificial Sequence: Synthetic oligonucleotide"
  source: /note="Description of Combined DNA/RNA Molecule: Synthetic oligonucleotide"
uauugccauuuuguccuuutt

SEQ ID NO: 197 - DNA, 21 bp, Artificial Sequence
  source: /note="Description of Artificial Sequence: Synthetic oligonucleotide"
  source: /note="Description of Combined DNA/RNA Molecule: Synthetic oligonucleotide"
uugugcuggaaaacccaggtt

SEQ ID NO: 198 - DNA, 21 bp, Artificial Sequence
  source: /note="Description of Artificial Sequence: Synthetic oligonucleotide"
  source: /note="Description of Combined DNA/RNA Molecule: Synthetic oligonucleotide"
uaacugauuauggaauagutt

SEQ ID NO: 199 - DNA, 21 bp, Artificial Sequence
  source: /note="Description of Artificial Sequence: Synthetic oligonucleotide"
  source: /note="Description of Combined DNA/RNA Molecule: Synthetic oligonucleotide"
gaauaguucuuucuccugctt

SEQ ID NO: 200 - DNA, 21 bp, Artificial Sequence
  source: /note="Description of Artificial Sequence: Synthetic oligonucleotide"
  source: /note="Description of Combined DNA/RNA Molecule: Synthetic oligonucleotide"
ggagggaaacaugguuacutt

SEQ ID NO: 201 - DNA, 21 bp, Artificial Sequence
  source: /note="Description of Artificial Sequence: Synthetic oligonucleotide"
  source: /note="Description of Combined DNA/RNA Molecule: Synthetic oligonucleotide"
cccgggcuagcuuuugaaatt

SEQ ID NO: 202 - DNA, 21 bp, Artificial Sequence
  source: /note="Description of Artificial Sequence: Synthetic oligonucleotide"
  source: /note="Description of Combined DNA/RNA Molecule: Synthetic oligonucleotide"
uggaauaguucuuucuccutt

SEQ ID NO: 203 - DNA, 21 bp, Artificial Sequence
  source: /note="Description of Artificial Sequence: Synthetic oligonucleotide"
  source: /note="Description of Combined DNA/RNA Molecule: Synthetic oligonucleotide"
auuggauuuccuaaaggugtt

SEQ ID NO: 204 - DNA, 21 bp, Artificial Sequence
  source: /note="Description of Artificial Sequence: Synthetic oligonucleotide"
  source: /note="Description of Combined DNA/RNA Molecule: Synthetic oligonucleotide"
ugacuaaacuugaaaaaugtt

SEQ ID NO: 205 - DNA, 21 bp, Artificial Sequence
  source: /note="Description of Artificial Sequence: Synthetic oligonucleotide"
  source: /note="Description of Combined DNA/RNA Molecule: Synthetic oligonucleotide"
cgcccaccacaaaugcagutt

SEQ ID NO: 206 - DNA, 21 bp, Artificial Sequence
  source: /note="Description of Artificial Sequence: Synthetic oligonucleotide"
  source: /note="Description of Combined DNA/RNA Molecule: Synthetic oligonucleotide"
ccugauuucccugaccugctt

SEQ ID NO: 207 - DNA, 21 bp, Artificial Sequence
  source: /note="Description of Artificial Sequence: Synthetic oligonucleotide"
  source: /note="Description of Combined DNA/RNA Molecule: Synthetic oligonucleotide"
ugaagcaugguguuucagatt

SEQ ID NO: 208 - DNA, 21 bp, Artificial Sequence
  source: /note="Description of Artificial Sequence: Synthetic oligonucleotide"
  source: /note="Description of Combined DNA/RNA Molecule: Synthetic oligonucleotide"
agcagacuuguuccgaccctt

SEQ ID NO: 209 - DNA, 21 bp, Artificial Sequence
  source: /note="Description of Artificial Sequence: Synthetic oligonucleotide"
  source: /note="Description of Combined DNA/RNA Molecule: Synthetic oligonucleotide"
ggauuugacuucuuuuuuatt

SEQ ID NO: 210 - DNA, 21 bp, Artificial Sequence
  source: /note="Description of Artificial Sequence: Synthetic oligonucleotide"
  source: /note="Description of Combined DNA/RNA Molecule: Synthetic oligonucleotide"
gauggcuuguuccagaugctt

SEQ ID NO: 211 - DNA, 21 bp, Artificial Sequence
  source: /note="Description of Artificial Sequence: Synthetic oligonucleotide"
  source: /note="Description of Combined DNA/RNA Molecule: Synthetic oligonucleotide"
cagaacgaaaguuauauggtt

SEQ ID NO: 212 - DNA, 21 bp, Artificial Sequence
  source: /note="Description of Artificial Sequence: Synthetic oligonucleotide"
  source: /note="Description of Combined DNA/RNA Molecule: Synthetic oligonucleotide"
uuauggaauaguucuuucutt

SEQ ID NO: 213 - DNA, 21 bp, Artificial Sequence
  source: /note="Description of Artificial Sequence: Synthetic oligonucleotide"
  source: /note="Description of Combined DNA/RNA Molecule: Synthetic oligonucleotide"
augguguuucagaacugagtt

SEQ ID NO: 214 - DNA, 21 bp, Artificial Sequence
  source: /note="Description of Artificial Sequence: Synthetic oligonucleotide"
  source: /note="Description of Combined DNA/RNA Molecule: Synthetic oligonucleotide"
uccuggaauauuagaugcctt

SEQ ID NO: 215 - DNA, 21 bp, Artificial Sequence
  source: /note="Description of Artificial Sequence: Synthetic oligonucleotide"
  source: /note="Description of Combined DNA/RNA Molecule: Synthetic oligonucleotide"
aggaccagauugcuuacuctt

SEQ ID NO: 216 - DNA, 21 bp, Artificial Sequence
  source: /note="Description of Artificial Sequence: Synthetic oligonucleotide"
  source: /note="Description of Combined DNA/RNA Molecule: Synthetic oligonucleotide"
uggugacacccugacucuctt

SEQ ID NO: 217 - DNA, 21 bp, Artificial Sequence
  source: /note="Description of Artificial Sequence: Synthetic oligonucleotide"
  source: /note="Description of Combined DNA/RNA Molecule: Synthetic oligonucleotide"
auuugacuucuuuuuuaagtt

SEQ ID NO: 218 - DNA, 21 bp, Artificial Sequence
  source: /note="Description of Artificial Sequence: Synthetic oligonucleotide"
  source: /note="Description of Combined DNA/RNA Molecule: Synthetic oligonucleotide"
cuucaggcccaauauuguatt

SEQ ID NO: 219 - DNA, 21 bp, Artificial Sequence
  source: /note="Description of Artificial Sequence: Synthetic oligonucleotide"
  source: /note="Description of Combined DNA/RNA Molecule: Synthetic oligonucleotide"
uggaagcuacuuugacuagtt

SEQ ID NO: 220 - DNA, 21 bp, Artificial Sequence
  source: /note="Description of Artificial Sequence: Synthetic oligonucleotide"
  source: /note="Description of Combined DNA/RNA Molecule: Synthetic oligonucleotide"
uaaccagcuuccugaaguctt

SEQ ID NO: 221 - DNA, 21 bp, Artificial Sequence
  source: /note="Description of Artificial Sequence: Synthetic oligonucleotide"
  source: /note="Description of Combined DNA/RNA Molecule: Synthetic oligonucleotide"
aaaaauguucucaaaaaugtt

SEQ ID NO: 222 - DNA, 21 bp, Artificial Sequence
  source: /note="Description of Artificial Sequence: Synthetic oligonucleotide"
  source: /note="Description of Combined DNA/RNA Molecule: Synthetic oligonucleotide"
uagcagacuuguuccgacctt

SEQ ID NO: 223 - DNA, 21 bp, Artificial Sequence
  source: /note="Description of Artificial Sequence: Synthetic oligonucleotide"
  source: /note="Description of Combined DNA/RNA Molecule: Synthetic oligonucleotide"
uuccccucagcuaaugacgtt

SEQ ID NO: 224 - DNA, 21 bp, Artificial Sequence
  source: /note="Description of Artificial Sequence: Synthetic oligonucleotide"
  source: /note="Description of Combined DNA/RNA Molecule: Synthetic oligonucleotide"
ugggcaguauuuugugcugtt

SEQ ID NO: 225 - DNA, 21 bp, Artificial Sequence
  source: /note="Description of Artificial Sequence: Synthetic oligonucleotide"
  source: /note="Description of Combined DNA/RNA Molecule: Synthetic oligonucleotide"
acccaaggaccagauugcutt

SEQ ID NO: 226 - DNA, 21 bp, Artificial Sequence
  source: /note="Description of Artificial Sequence: Synthetic oligonucleotide"
  source: /note="Description of Combined DNA/RNA Molecule: Synthetic oligonucleotide"
ggaagcuacuuugacuagutt

SEQ ID NO: 227 - DNA, 21 bp, Artificial Sequence
  source: /note="Description of Artificial Sequence: Synthetic oligonucleotide"
  source: /note="Description of Combined DNA/RNA Molecule: Synthetic oligonucleotide"
cccaauauuguaauuucagtt

SEQ ID NO: 228 - DNA, 21 bp, Artificial Sequence
  source: /note="Description of Artificial Sequence: Synthetic oligonucleotide"
  source: /note="Description of Combined DNA/RNA Molecule: Synthetic oligonucleotide"
cuuugggcaguauuuugugtt

SEQ ID NO: 229 - DNA, 21 bp, Artificial Sequence
  source: /note="Description of Artificial Sequence: Synthetic oligonucleotide"
  source: /note="Description of Combined DNA/RNA Molecule: Synthetic oligonucleotide"
uuguuuaaaacccaauauctt

SEQ ID NO: 230 - DNA, 21 bp, Artificial Sequence
  source: /note="Description of Artificial Sequence: Synthetic oligonucleotide"
  source: /note="Description of Combined DNA/RNA Molecule: Synthetic oligonucleotide"
ccugguccugauuucccugtt

SEQ ID NO: 231 - DNA, 21 bp, Artificial Sequence
  source: /note="Description of Artificial Sequence: Synthetic oligonucleotide"
  source: /note="Description of Combined DNA/RNA Molecule: Synthetic oligonucleotide"
uuccagaugcauuuuaacctt

SEQ ID NO: 232 - DNA, 21 bp, Artificial Sequence
  source: /note="Description of Artificial Sequence: Synthetic oligonucleotide"
  source: /note="Description of Combined DNA/RNA Molecule: Synthetic oligonucleotide"
aaaugacaacacuugaagctt

SEQ ID NO: 233 - DNA, 21 bp, Artificial Sequence
  source: /note="Description of Artificial Sequence: Synthetic oligonucleotide"
  source: /note="Description of Combined DNA/RNA Molecule: Synthetic oligonucleotide"
ccaaauauggcuggaaugctt

SEQ ID NO: 234 - DNA, 21 bp, Artificial Sequence
  source: /note="Description of Artificial Sequence: Synthetic oligonucleotide"
  source: /note="Description of Combined DNA/RNA Molecule: Synthetic oligonucleotide"
cucaaugcuucaauguccctt

SEQ ID NO: 235 - DNA, 21 bp, Artificial Sequence
  source: /note="Description of Artificial Sequence: Synthetic oligonucleotide"
  source: /note="Description of Combined DNA/RNA Molecule: Synthetic oligonucleotide"
accagcuuccugaagucactt

SEQ ID NO: 236 - DNA, 21 bp, Artificial Sequence
  source: /note="Description of Artificial Sequence: Synthetic oligonucleotide"
  source: /note="Description of Combined DNA/RNA Molecule: Synthetic oligonucleotide"
ccuuggauuugacuucuuutt

SEQ ID NO: 237 - DNA, 21 bp, Artificial Sequence
  source: /note="Description of Artificial Sequence: Synthetic oligonucleotide"
  source: /note="Description of Combined DNA/RNA Molecule: Synthetic oligonucleotide"
uuccauagaucuggaucugtt

SEQ ID NO: 238 - DNA, 21 bp, Artificial Sequence
  source: /note="Description of Artificial Sequence: Synthetic oligonucleotide"
  source: /note="Description of Combined DNA/RNA Molecule: Synthetic oligonucleotide"
aacuucaggcccaauauugtt

SEQ ID NO: 239 - DNA, 21 bp, Artificial Sequence
  source: /note="Description of Artificial Sequence: Synthetic oligonucleotide"
  source: /note="Description of Combined DNA/RNA Molecule: Synthetic oligonucleotide"
aagaguuaucgccagugugtt

SEQ ID NO: 240 - DNA, 21 bp, Artificial Sequence
  source: /note="Description of Artificial Sequence: Synthetic oligonucleotide"
  source: /note="Description of Combined DNA/RNA Molecule: Synthetic oligonucleotide"
ucaggaugcgaugucuaugtt

SEQ ID NO: 241 - DNA, 21 bp, Artificial Sequence
  source: /note="Description of Artificial Sequence: Synthetic oligonucleotide"
  source: /note="Description of Combined DNA/RNA Molecule: Synthetic oligonucleotide"
uccagaugcauuuuaaccatt

SEQ ID NO: 242 - DNA, 21 bp, Artificial Sequence
  source: /note="Description of Artificial Sequence: Synthetic oligonucleotide"
  source: /note="Description of Combined DNA/RNA Molecule: Synthetic oligonucleotide"
acugaggugaccuucaggatt

SEQ ID NO: 243 - DNA, 21 bp, Artificial Sequence
  source: /note="Description of Artificial Sequence: Synthetic oligonucleotide"
  source: /note="Description of Combined DNA/RNA Molecule: Synthetic oligonucleotide"
gauuugacuucuuuuuuaatt

SEQ ID NO: 244 - DNA, 21 bp, Artificial Sequence
  source: /note="Description of Artificial Sequence: Synthetic oligonucleotide"
  source: /note="Description of Combined DNA/RNA Molecule: Synthetic oligonucleotide"
cugguccugauuucccugatt

SEQ ID NO: 245 - DNA, 21 bp, Artificial Sequence
  source: /note="Description of Artificial Sequence: Synthetic oligonucleotide"
  source: /note="Description of Combined DNA/RNA Molecule: Synthetic oligonucleotide"
acacugaagaguuaucgcctt

SEQ ID NO: 246 - DNA, 21 bp, Artificial Sequence
  source: /note="Description of Artificial Sequence: Synthetic oligonucleotide"
  source: /note="Description of Combined DNA/RNA Molecule: Synthetic oligonucleotide"
aaaucaccacucuuugggctt

SEQ ID NO: 247 - DNA, 21 bp, Artificial Sequence
  source: /note="Description of Artificial Sequence: Synthetic oligonucleotide"
  source: /note="Description of Combined DNA/RNA Molecule: Synthetic oligonucleotide"
acccagggaccaucaaagutt

SEQ ID NO: 248 - DNA, 21 bp, Artificial Sequence
  source: /note="Description of Artificial Sequence: Synthetic oligonucleotide"
  source: /note="Description of Combined DNA/RNA Molecule: Synthetic oligonucleotide"
cccagggaccaucaaagugtt

SEQ ID NO: 249 - DNA, 21 bp, Artificial Sequence
  source: /note="Description of Artificial Sequence: Synthetic oligonucleotide"
  source: /note="Description of Combined DNA/RNA Molecule: Synthetic oligonucleotide"
ugacaacacuugaagcaugtt

SEQ ID NO: 250 - DNA, 21 bp, Artificial Sequence
  source: /note="Description of Artificial Sequence: Synthetic oligonucleotide"
  source: /note="Description of Combined DNA/RNA Molecule: Synthetic oligonucleotide"
uucuuauuggugacguggatt

SEQ ID NO: 251 - DNA, 21 bp, Artificial Sequence
  source: /note="Description of Artificial Sequence: Synthetic oligonucleotide"
  source: /note="Description of Combined DNA/RNA Molecule: Synthetic oligonucleotide"
cacuucgagccucacaugctt

SEQ ID NO: 252 - DNA, 21 bp, Artificial Sequence
  source: /note="Description of Artificial Sequence: Synthetic oligonucleotide"
  source: /note="Description of Combined DNA/RNA Molecule: Synthetic oligonucleotide"
cuucuuauuggugacguggtt

SEQ ID NO: 253 - DNA, 21 bp, Artificial Sequence
  source: /note="Description of Artificial Sequence: Synthetic oligonucleotide"
  source: /note="Description of Combined DNA/RNA Molecule: Synthetic oligonucleotide"
auggaauaguucuuucucctt

SEQ ID NO: 254 - DNA, 21 bp, Artificial Sequence
  source: /note="Description of Artificial Sequence: Synthetic oligonucleotide"
  source: /note="Description of Combined DNA/RNA Molecule: Synthetic oligonucleotide"
aaaaucaccacucuuugggtt

SEQ ID NO: 255 - DNA, 21 bp, Artificial Sequence
  source: /note="Description of Artificial Sequence: Synthetic oligonucleotide"
  source: /note="Description of Combined DNA/RNA Molecule: Synthetic oligonucleotide"
cuuggauuugacuucuuuutt

SEQ ID NO: 256 - DNA, 21 bp, Artificial Sequence
  source: /note="Description of Artificial Sequence: Synthetic oligonucleotide"
  source: /note="Description of Combined DNA/RNA Molecule: Synthetic oligonucleotide"
uguccuggaauauuagaugtt

SEQ ID NO: 257 - DNA, 21 bp, Artificial Sequence
  source: /note="Description of Artificial Sequence: Synthetic oligonucleotide"
  source: /note="Description of Combined DNA/RNA Molecule: Synthetic oligonucleotide"
aggagggaaacaugguuactt

SEQ ID NO: 258 - DNA, 21 bp, Artificial Sequence
  source: /note="Description of Artificial Sequence: Synthetic oligonucleotide"
  source: /note="Description of Combined DNA/RNA Molecule: Synthetic oligonucleotide"
aagcaaccaacuucaggcctt

SEQ ID NO: 259 - DNA, 21 bp, Artificial Sequence
  source: /note="Description of Artificial Sequence: Synthetic oligonucleotide"
  source: /note="Description of Combined DNA/RNA Molecule: Synthetic oligonucleotide"
augucaguuguuuaaaacctt

SEQ ID NO: 260 - DNA, 21 bp, Artificial Sequence
  source: /note="Description of Artificial Sequence: Synthetic oligonucleotide"
  source: /note="Description of Combined DNA/RNA Molecule: Synthetic oligonucleotide"
uaugucaguuguuuaaaactt

SEQ ID NO: 261 - DNA, 21 bp, Artificial Sequence
  source: /note="Description of Artificial Sequence: Synthetic oligonucleotide"
  source: /note="Description of Combined DNA/RNA Molecule: Synthetic oligonucleotide"
aauuucaggaugcgauguctt

SEQ ID NO: 262 - DNA, 21 bp, Artificial Sequence
  source: /note="Description of Artificial Sequence: Synthetic oligonucleotide"
  source: /note="Description of Combined DNA/RNA Molecule: Synthetic oligonucleotide"
uucaggcccaauauuguaatt

SEQ ID NO: 263 - DNA, 21 bp, Artificial Sequence
  source: /note="Description of Artificial Sequence: Synthetic oligonucleotide"
  source: /note="Description of Combined DNA/RNA Molecule: Synthetic oligonucleotide"
ucagacagcauuggauuuctt

SEQ ID NO: 264 - DNA, 21 bp, Artificial Sequence
  source: /note="Description of Artificial Sequence: Synthetic oligonucleotide"
  source: /note="Description of Combined DNA/RNA Molecule: Synthetic oligonucleotide"
aagcuacuuugacuaguuutt

SEQ ID NO: 265 - DNA, 21 bp, Artificial Sequence
  source: /note="Description of Artificial Sequence: Synthetic oligonucleotide"
  source: /note="Description of Combined DNA/RNA Molecule: Synthetic oligonucleotide"
gggaccaucaaagugggagtt

SEQ ID NO: 266 - DNA, 21 bp, Artificial Sequence
  source: /note="Description of Artificial Sequence: Synthetic oligonucleotide"
  source: /note="Description of Combined DNA/RNA Molecule: Synthetic oligonucleotide"
ugacacccugacucucagutt

SEQ ID NO: 267 - DNA, 21 bp, Artificial Sequence
  source: /note="Description of Artificial Sequence: Synthetic oligonucleotide"
  source: /note="Description of Combined DNA/RNA Molecule: Synthetic oligonucleotide"
caauauuguaauuucaggatt

SEQ ID NO: 268 - DNA, 21 bp, Artificial Sequence
  source: /note="Description of Artificial Sequence: Synthetic oligonucleotide"
  source: /note="Description of Combined DNA/RNA Molecule: Synthetic oligonucleotide"
aaagcaaccaacuucaggctt

SEQ ID NO: 269 - DNA, 21 bp, Artificial Sequence
  source: /note="Description of Artificial Sequence: Synthetic oligonucleotide"
  source: /note="Description of Combined DNA/RNA Molecule: Synthetic oligonucleotide"
ugcuuacucagacaccagctt

SEQ ID NO: 270 - DNA, 21 bp, Artificial Sequence
  source: /note="Description of Artificial Sequence: Synthetic oligonucleotide"
  source: /note="Description of Combined DNA/RNA Molecule: Synthetic oligonucleotide"
aggcccaauauuguaauuutt

SEQ ID NO: 271 - DNA, 21 bp, Artificial Sequence
  source: /note="Description of Artificial Sequence: Synthetic oligonucleotide"
  source: /note="Description of Combined DNA/RNA Molecule: Synthetic oligonucleotide"
ucuuuccuuggauuugacutt

SEQ ID NO: 272 - DNA, 21 bp, Artificial Sequence
  source: /note="Description of Artificial Sequence: Synthetic oligonucleotide"
  source: /note="Description of Combined DNA/RNA Molecule: Synthetic oligonucleotide"
ugggccaguaaugggaacctt

SEQ ID NO: 273 - DNA, 21 bp, Artificial Sequence
  source: /note="Description of Artificial Sequence: Synthetic oligonucleotide"
  source: /note="Description of Combined DNA/RNA Molecule: Synthetic oligonucleotide"
agcaaccaacuucaggccctt

SEQ ID NO: 274 - DNA, 21 bp, Artificial Sequence
  source: /note="Description of Artificial Sequence: Synthetic oligonucleotide"
  source: /note="Description of Combined DNA/RNA Molecule: Synthetic oligonucleotide"
uuuuuuaaggauucuugggtt

SEQ ID NO: 275 - DNA, 21 bp, Artificial Sequence
  source: /note="Description of Artificial Sequence: Synthetic oligonucleotide"
  source: /note="Description of Combined DNA/RNA Molecule: Synthetic oligonucleotide"
uggauuugacuucuuuuuutt

SEQ ID NO: 276 - DNA, 21 bp, Artificial Sequence
  source: /note="Description of Artificial Sequence: Synthetic oligonucleotide"
  source: /note="Description of Combined DNA/RNA Molecule: Synthetic oligonucleotide"
agggaccaucaaagugggatt

SEQ ID NO: 277 - DNA, 21 bp, Artificial Sequence
  source: /note="Description of Artificial Sequence: Synthetic oligonucleotide"
  source: /note="Description of Combined DNA/RNA Molecule: Synthetic oligonucleotide"
gacacccugacucucagugtt

SEQ ID NO: 278 - DNA, 21 bp, Artificial Sequence
  source: /note="Description of Artificial Sequence: Synthetic oligonucleotide"
  source: /note="Description of Combined DNA/RNA Molecule: Synthetic oligonucleotide"
acgcccaccacaaaugcagtt

SEQ ID NO: 279 - DNA, 21 bp, Artificial Sequence
  source: /note="Description of Artificial Sequence: Synthetic oligonucleotide"
  source: /note="Description of Combined DNA/RNA Molecule: Synthetic oligonucleotide"
uuuuuuauugccauuuugutt

SEQ ID NO: 280 - DNA, 21 bp, Artificial Sequence
  source: /note="Description of Artificial Sequence: Synthetic oligonucleotide"
  source: /note="Description of Combined DNA/RNA Molecule: Synthetic oligonucleotide"
uuuccuaaaggugcucaggtt

SEQ ID NO: 281 - DNA, 21 bp, Artificial Sequence
  source: /note="Description of Artificial Sequence: Synthetic oligonucleotide"
  source: /note="Description of Combined DNA/RNA Molecule: Synthetic oligonucleotide"
uuaaaacugugaauaaaugtt

SEQ ID NO: 282 - DNA, 21 bp, Artificial Sequence
  source: /note="Description of Artificial Sequence: Synthetic oligonucleotide"
  source: /note="Description of Combined DNA/RNA Molecule: Synthetic oligonucleotide"
aucuuuccuuggauuugactt

SEQ ID NO: 283 - DNA, 21 bp, Artificial Sequence
  source: /note="Description of Artificial Sequence: Synthetic oligonucleotide"
  source: /note="Description of Combined DNA/RNA Molecule: Synthetic oligonucleotide"
aucaccacucuuugggcagtt

SEQ ID NO: 284 - DNA, 21 bp, Artificial Sequence
  source: /note="Description of Artificial Sequence: Synthetic oligonucleotide"
  source: /note="Description of Combined DNA/RNA Molecule: Synthetic oligonucleotide"
uggauccuugccauucccctt

SEQ ID NO: 285 - DNA, 21 bp, Artificial Sequence
  source: /note="Description of Artificial Sequence: Synthetic oligonucleotide"
  source: /note="Description of Combined DNA/RNA Molecule: Synthetic oligonucleotide"
ugaggugaccuucaggaagtt

SEQ ID NO: 286 - DNA, 21 bp, Artificial Sequence
  source: /note="Description of Artificial Sequence: Synthetic oligonucleotide"
  source: /note="Description of Combined DNA/RNA Molecule: Synthetic oligonucleotide"
agcuucuuauuggugacgutt

SEQ ID NO: 287 - DNA, 21 bp, Artificial Sequence
  source: /note="Description of Artificial Sequence: Synthetic oligonucleotide"
  source: /note="Description of Combined DNA/RNA Molecule: Synthetic oligonucleotide"
acacccugacucucagugctt

SEQ ID NO: 288 - DNA, 21 bp, Artificial Sequence
  source: /note="Description of Artificial Sequence: Synthetic oligonucleotide"
  source: /note="Description of Combined DNA/RNA Molecule: Synthetic oligonucleotide"
uuggauuugacuucuuuuutt

SEQ ID NO: 289 - DNA, 21 bp, Artificial Sequence
  source: /note="Description of Artificial Sequence: Synthetic oligonucleotide"
  source: /note="Description of Combined DNA/RNA Molecule: Synthetic oligonucleotide"
auuuugugcuggaaaaccctt

SEQ ID NO: 290 - DNA, 21 bp, Artificial Sequence
  source: /note="Description of Artificial Sequence: Synthetic oligonucleotide"
  source: /note="Description of Combined DNA/RNA Molecule: Synthetic oligonucleotide"
gaaguauauuuuuuauugctt

SEQ ID NO: 291 - DNA, 21 bp, Artificial Sequence
  source: /note="Description of Artificial Sequence: Synthetic oligonucleotide"
  source: /note="Description of Combined DNA/RNA Molecule: Synthetic oligonucleotide"
uacugaaaaccuuuaaaggtt

SEQ ID NO: 292 - DNA, 21 bp, Artificial Sequence
  source: /note="Description of Artificial Sequence: Synthetic oligonucleotide"
  source: /note="Description of Combined DNA/RNA Molecule: Synthetic oligonucleotide"
aauagcagacuuguuccgatt

SEQ ID NO: 293 - DNA, 21 bp, Artificial Sequence
  source: /note="Description of Artificial Sequence: Synthetic oligonucleotide"
  source: /note="Description of Combined DNA/RNA Molecule: Synthetic oligonucleotide"
auuuuuuauugccauuuugtt

SEQ ID NO: 294 - DNA, 21 bp, Artificial Sequence
  source: /note="Description of Artificial Sequence: Synthetic oligonucleotide"
  source: /note="Description of Combined DNA/RNA Molecule: Synthetic oligonucleotide"
uugggcaguauuuugugcutt

SEQ ID NO: 295 - DNA, 21 bp, Artificial Sequence
  source: /note="Description of Artificial Sequence: Synthetic oligonucleotide"
  source: /note="Description of Combined DNA/RNA Molecule: Synthetic oligonucleotide"
ucucaaugcuucaaugucctt

SEQ ID NO: 296 - DNA, 21 bp, Artificial Sequence
  source: /note="Description of Artificial Sequence: Synthetic oligonucleotide"
  source: /note="Description of Combined DNA/RNA Molecule: Synthetic oligonucleotide"
uuaaauuugugauuuucactt

SEQ ID NO: 297 - DNA, 21 bp, Artificial Sequence
  source: /note="Description of Artificial Sequence: Synthetic oligonucleotide"
  source: /note="Description of Combined DNA/RNA Molecule: Synthetic oligonucleotide"
ucagaacgaaaguuauaugtt

SEQ ID NO: 298 - DNA, 21 bp, Artificial Sequence
  source: /note="Description of Artificial Sequence: Synthetic oligonucleotide"
  source: /note="Description of Combined DNA/RNA Molecule: Synthetic oligonucleotide"
uuuauugccauuuuguccutt

SEQ ID NO: 299 - DNA, 21 bp, Artificial Sequence
  source: /note="Description of Artificial Sequence: Synthetic oligonucleotide"
  source: /note="Description of Combined DNA/RNA Molecule: Synthetic oligonucleotide"
uuugggcaguauuuugugctt

SEQ ID NO: 300 - DNA, 21 bp, Artificial Sequence
  source: /note="Description of Artificial Sequence: Synthetic oligonucleotide"
  source: /note="Description of Combined DNA/RNA Molecule: Synthetic oligonucleotide"
aaauguuuuuaaaacugugtt

SEQ ID NO: 301 - DNA, 21 bp, Artificial Sequence
  source: /note="Description of Artificial Sequence: Synthetic oligonucleotide"
  source: /note="Description of Combined DNA/RNA Molecule: Synthetic oligonucleotide"
acugaaaaccuuuaaagggtt

SEQ ID NO: 302 - DNA, 21 bp, Artificial Sequence
  source: /note="Description of Artificial Sequence: Synthetic oligonucleotide"
  source: /note="Description of Combined DNA/RNA Molecule: Synthetic oligonucleotide"
uugugaucaaccaggagggtt

SEQ ID NO: 303 - DNA, 21 bp, Artificial Sequence
  source: /note="Description of Artificial Sequence: Synthetic oligonucleotide"
  source: /note="Description of Combined DNA/RNA Molecule: Synthetic oligonucleotide"
cauuuucuuuaaauuugugtt

SEQ ID NO: 304 - DNA, 21 bp, Artificial Sequence
  source: /note="Description of Artificial Sequence: Synthetic oligonucleotide"
  source: /note="Description of Combined DNA/RNA Molecule: Synthetic oligonucleotide"
cuuuuuuaaggauucuuggtt

SEQ ID NO: 305 - DNA, 21 bp, Artificial Sequence
  source: /note="Description of Artificial Sequence: Synthetic oligonucleotide"
  source: /note="Description of Combined DNA/RNA Molecule: Synthetic oligonucleotide"
aaacgcccaccacaaaugctt

SEQ ID NO: 306 - DNA, 21 bp, Artificial Sequence
  source: /note="Description of Artificial Sequence: Synthetic oligonucleotide"
  source: /note="Description of Combined DNA/RNA Molecule: Synthetic oligonucleotide"
aaauagcagacuuguuccgtt

SEQ ID NO: 307 - DNA, 21 bp, Artificial Sequence
  source: /note="Description of Artificial Sequence: Synthetic oligonucleotide"
  source: /note="Description of Combined DNA/RNA Molecule: Synthetic oligonucleotide"
gagcuucuuauuggugacgtt

SEQ ID NO: 308 - DNA, 21 bp, Artificial Sequence
  source: /note="Description of Artificial Sequence: Synthetic oligonucleotide"
  source: /note="Description of Combined DNA/RNA Molecule: Synthetic oligonucleotide"
cagauauuaauuuuccauatt

SEQ ID NO: 309 - DNA, 21 bp, Artificial Sequence
  source: /note="Description of Artificial Sequence: Synthetic oligonucleotide"
  source: /note="Description of Combined DNA/RNA Molecule: Synthetic oligonucleotide"
uauuguaauuucaggaugctt

SEQ ID NO: 310 - DNA, 21 bp, Artificial Sequence
  source: /note="Description of Artificial Sequence: Synthetic oligonucleotide"
  source: /note="Description of Combined DNA/RNA Molecule: Synthetic oligonucleotide"
ugugauuuucacauuuuuctt

SEQ ID NO: 311 - DNA, 21 bp, Artificial Sequence
  source: /note="Description of Artificial Sequence: Synthetic oligonucleotide"
  source: /note="Description of Combined DNA/RNA Molecule: Synthetic oligonucleotide"
ugacguggaacugaaaaggtt

SEQ ID NO: 312 - DNA, 21 bp, Artificial Sequence
  source: /note="Description of Artificial Sequence: Synthetic oligonucleotide"
  source: /note="Description of Combined DNA/RNA Molecule: Synthetic oligonucleotide"
gaaagaggaagagugggugtt

SEQ ID NO: 313 - DNA, 21 bp, Artificial Sequence
  source: /note="Description of Artificial Sequence: Synthetic oligonucleotide"
  source: /note="Description of Combined DNA/RNA Molecule: Synthetic oligonucleotide"
uuuccuuggauuugacuuctt

SEQ ID NO: 314 - DNA, 21 bp, Artificial Sequence
  source: /note="Description of Artificial Sequence: Synthetic oligonucleotide"
  source: /note="Description of Combined DNA/RNA Molecule: Synthetic oligonucleotide"
ugauccuuucugaggcguctt

SEQ ID NO: 315 - DNA, 21 bp, Artificial Sequence
  source: /note="Description of Artificial Sequence: Synthetic oligonucleotide"
  source: /note="Description of Combined DNA/RNA Molecule: Synthetic oligonucleotide"
augucuaugcagagguaactt

SEQ ID NO: 316 - DNA, 21 bp, Artificial Sequence
  source: /note="Description of Artificial Sequence: Synthetic oligonucleotide"
  source: /note="Description of Combined DNA/RNA Molecule: Synthetic oligonucleotide"
ucaggcccaauauuguaautt

SEQ ID NO: 317 - DNA, 21 bp, Artificial Sequence
  source: /note="Description of Artificial Sequence: Synthetic oligonucleotide"
  source: /note="Description of Combined DNA/RNA Molecule: Synthetic oligonucleotide"
cuuuaaauuugugauuuuctt

SEQ ID NO: 318 - DNA, 21 bp, Artificial Sequence
  source: /note="Description of Artificial Sequence: Synthetic oligonucleotide"
  source: /note="Description of Combined DNA/RNA Molecule: Synthetic oligonucleotide"
acuucuuuuuuaaggauuctt

SEQ ID NO: 319 - DNA, 21 bp, Artificial Sequence
  source: /note="Description of Artificial Sequence: Synthetic oligonucleotide"
  source: /note="Description of Combined DNA/RNA Molecule: Synthetic oligonucleotide"
uucgagccucacaugcgactt

SEQ ID NO: 320 - DNA, 21 bp, Artificial Sequence
  source: /note="Description of Artificial Sequence: Synthetic oligonucleotide"
  source: /note="Description of Combined DNA/RNA Molecule: Synthetic oligonucleotide"
uuuuccauagaucuggauctt

SEQ ID NO: 321 - DNA, 21 bp, Artificial Sequence
  source: /note="Description of Artificial Sequence: Synthetic oligonucleotide"
  source: /note="Description of Combined DNA/RNA Molecule: Synthetic oligonucleotide"
uauggaauaguucuuucuctt

SEQ ID NO: 322 - DNA, 21 bp, Artificial Sequence
  source: /note="Description of Artificial Sequence: Synthetic oligonucleotide"
  source: /note="Description of Combined DNA/RNA Molecule: Synthetic oligonucleotide"
gacguggaacugaaaagggtt

SEQ ID NO: 323 - DNA, 21 bp, Artificial Sequence
  source: /note="Description of Artificial Sequence: Synthetic oligonucleotide"
  source: /note="Description of Combined DNA/RNA Molecule: Synthetic oligonucleotide"
auuaauuuuccauagaucutt

SEQ ID NO: 324 - DNA, 21 bp, Artificial Sequence
  source: /note="Description of Artificial Sequence: Synthetic oligonucleotide"
  source: /note="Description of Combined DNA/RNA Molecule: Synthetic oligonucleotide"
ugcagccuacacaaaggactt

SEQ ID NO: 325 - DNA, 21 bp, Artificial Sequence
  source: /note="Description of Artificial Sequence: Synthetic oligonucleotide"
  source: /note="Description of Combined DNA/RNA Molecule: Synthetic oligonucleotide"
aaccaggagggaaacauggtt

SEQ ID NO: 326 - DNA, 21 bp, Artificial Sequence
  source: /note="Description of Artificial Sequence: Synthetic oligonucleotide"
  source: /note="Description of Combined DNA/RNA Molecule: Synthetic oligonucleotide"
uaauuuuccauagaucuggtt

SEQ ID NO: 327 - DNA, 21 bp, Artificial Sequence
  source: /note="Description of Artificial Sequence: Synthetic oligonucleotide"
  source: /note="Description of Combined DNA/RNA Molecule: Synthetic oligonucleotide"
ugucaguuguuuaaaaccctt

SEQ ID NO: 328 - DNA, 21 bp, Artificial Sequence
  source: /note="Description of Artificial Sequence: Synthetic oligonucleotide"
  source: /note="Description of Combined DNA/RNA Molecule: Synthetic oligonucleotide"
uugaagcaugguguuucagtt

SEQ ID NO: 329 - DNA, 21 bp, Artificial Sequence
  source: /note="Description of Artificial Sequence: Synthetic oligonucleotide"
  source: /note="Description of Combined DNA/RNA Molecule: Synthetic oligonucleotide"
ucgccugguccugauuucctt

SEQ ID NO: 330 - DNA, 21 bp, Artificial Sequence
  source: /note="Description of Artificial Sequence: Synthetic oligonucleotide"
  source: /note="Description of Combined DNA/RNA Molecule: Synthetic oligonucleotide"
uaaaacugugaauaaauggtt

SEQ ID NO: 331 - DNA, 21 bp, Artificial Sequence
  source: /note="Description of Artificial Sequence: Synthetic oligonucleotide"
  source: /note="Description of Combined DNA/RNA Molecule: Synthetic oligonucleotide"
uuggauuuccuaaaggugctt

SEQ ID NO: 332 - DNA, 21 bp, Artificial Sequence
  source: /note="Description of Artificial Sequence: Synthetic oligonucleotide"
  source: /note="Description of Combined DNA/RNA Molecule: Synthetic oligonucleotide"
aaguauauuuuuuauugcctt

SEQ ID NO: 333 - DNA, 21 bp, Artificial Sequence
  source: /note="Description of Artificial Sequence: Synthetic oligonucleotide"
  source: /note="Description of Combined DNA/RNA Molecule: Synthetic oligonucleotide"
uauuaauuuuccauagauctt

SEQ ID NO: 334 - DNA, 21 bp, Artificial Sequence
  source: /note="Description of Artificial Sequence: Synthetic oligonucleotide"
  source: /note="Description of Combined DNA/RNA Molecule: Synthetic oligonucleotide"
auauuguaauuucaggaugtt

SEQ ID NO: 335 - DNA, 21 bp, Artificial Sequence
  source: /note="Description of Artificial Sequence: Synthetic oligonucleotide"
  source: /note="Description of Combined DNA/RNA Molecule: Synthetic oligonucleotide"
auccuuucugaggcgucgctt

SEQ ID NO: 336 - DNA, 21 bp, Artificial Sequence
  source: /note="Description of Artificial Sequence: Synthetic oligonucleotide"
  source: /note="Description of Combined DNA/RNA Molecule: Synthetic oligonucleotide"
uuuuuauugccauuuuguctt

SEQ ID NO: 337 - DNA, 21 bp, Artificial Sequence
  source: /note="Description of Artificial Sequence: Synthetic oligonucleotide"
  source: /note="Description of Combined DNA/RNA Molecule: Synthetic oligonucleotide"
uagagaagaaaguuaaagctt

SEQ ID NO: 338 - DNA, 21 bp, Artificial Sequence
  source: /note="Description of Artificial Sequence: Synthetic oligonucleotide"
  source: /note="Description of Combined DNA/RNA Molecule: Synthetic oligonucleotide"
uuugacuucuuuuuuaaggtt

SEQ ID NO: 339 - DNA, 21 bp, Artificial Sequence
  source: /note="Description of Artificial Sequence: Synthetic oligonucleotide"
  source: /note="Description of Combined DNA/RNA Molecule: Synthetic oligonucleotide"
gcccaccacaaaugcagugtt

SEQ ID NO: 340 - DNA, 21 bp, Artificial Sequence
  source: /note="Description of Artificial Sequence: Synthetic oligonucleotide"
  source: /note="Description of Combined DNA/RNA Molecule: Synthetic oligonucleotide"
uaaagcaaccaacuucaggtt

SEQ ID NO: 341 - DNA, 21 bp, Artificial Sequence
  source: /note="Description of Artificial Sequence: Synthetic oligonucleotide"
  source: /note="Description of Combined DNA/RNA Molecule: Synthetic oligonucleotide"
uuaaagcaaccaacuucagtt

SEQ ID NO: 342 - DNA, 21 bp, Artificial Sequence
  source: /note="Description of Artificial Sequence: Synthetic oligonucleotide"
  source: /note="Description of Combined DNA/RNA Molecule: Synthetic oligonucleotide"
uuguuccgacccaaggacctt

SEQ ID NO: 343 - DNA, 21 bp, Artificial Sequence
  source: /note="Description of Artificial Sequence: Synthetic oligonucleotide"
  source: /note="Description of Combined DNA/RNA Molecule: Synthetic oligonucleotide"
uuaauuuuccauagaucugtt

SEQ ID NO: 344 - DNA, 21 bp, Artificial Sequence
  source: /note="Description of Artificial Sequence: Synthetic oligonucleotide"
  source: /note="Description of Combined DNA/RNA Molecule: Synthetic oligonucleotide"
aacacugaagaguuaucgctt

SEQ ID NO: 345 - DNA, 21 bp, Artificial Sequence
  source: /note="Description of Artificial Sequence: Synthetic oligonucleotide"
  source: /note="Description of Combined DNA/RNA Molecule: Synthetic oligonucleotide"
gacuucuuuuuuaaggauutt

SEQ ID NO: 346 - DNA, 21 bp, Artificial Sequence
  source: /note="Description of Artificial Sequence: Synthetic oligonucleotide"
  source: /note="Description of Combined DNA/RNA Molecule: Synthetic oligonucleotide"
ugacuucuuuuuuaaggautt

SEQ ID NO: 347 - DNA, 21 bp, Artificial Sequence
  source: /note="Description of Artificial Sequence: Synthetic oligonucleotide"
  source: /note="Description of Combined DNA/RNA Molecule: Synthetic oligonucleotide"
uugacuucuuuuuuaaggatt

SEQ ID NO: 348 - DNA, 21 bp, Artificial Sequence
  source: /note="Description of Artificial Sequence: Synthetic oligonucleotide"
  source: /note="Description of Combined DNA/RNA Molecule: Synthetic oligonucleotide"
aaacacugaagaguuaucgtt

SEQ ID NO: 349 - DNA, 21 bp, Artificial Sequence
  source: /note="Description of Artificial Sequence: Synthetic oligonucleotide"
  source: /note="Description of Combined DNA/RNA Molecule: Synthetic oligonucleotide"
auuauggaauaguucuuuctt

SEQ ID NO: 350 - DNA, 21 bp, Artificial Sequence
  source: /note="Description of Artificial Sequence: Synthetic oligonucleotide"
  source: /note="Description of Combined DNA/RNA Molecule: Synthetic oligonucleotide"
uuuuaaggauucuugggautt

SEQ ID NO: 351 - DNA, 21 bp, Artificial Sequence
  source: /note="Description of Artificial Sequence: Synthetic oligonucleotide"
  source: /note="Description of Combined DNA/RNA Molecule: Synthetic oligonucleotide"
ucuuuuuuaaggauucuugtt

SEQ ID NO: 352 - DNA, 21 bp, Artificial Sequence
  source: /note="Description of Artificial Sequence: Synthetic oligonucleotide"
  source: /note="Description of Combined DNA/RNA Molecule: Synthetic oligonucleotide"
uuuuuaaggauucuugggatt

SEQ ID NO: 353 - DNA, 21 bp, Artificial Sequence
  source: /note="Description of Artificial Sequence: Synthetic oligonucleotide"
  source: /note="Description of Combined DNA/RNA Molecule: Synthetic oligonucleotide"
auuuuaaccacaguggacctt

SEQ ID NO: 354 - DNA, 21 bp, Artificial Sequence
  source: /note="Description of Artificial Sequence: Synthetic oligonucleotide"
  source: /note="Description of Combined DNA/RNA Molecule: Synthetic oligonucleotide"
uuuuauugccauuuugucctt

SEQ ID NO: 355 - DNA, 21 bp, Artificial Sequence
  source: /note="Description of Artificial Sequence: Synthetic oligonucleotide"
  source: /note="Description of Combined DNA/RNA Molecule: Synthetic oligonucleotide"
auaacuuucguucugaaggtt

SEQ ID NO: 356 - DNA, 21 bp, Artificial Sequence
  source: /note="Description of Artificial Sequence: Synthetic oligonucleotide"
  source: /note="Description of Combined DNA/RNA Molecule: Synthetic oligonucleotide"
uuccauauaacuuucguuctt

SEQ ID NO: 357 - DNA, 21 bp, Artificial Sequence
  source: /note="Description of Artificial Sequence: Synthetic oligonucleotide"
  source: /note="Description of Combined DNA/RNA Molecule: Synthetic oligonucleotide"
uagauauuggguuuuaaactt

SEQ ID NO: 358 - DNA, 21 bp, Artificial Sequence
  source: /note="Description of Artificial Sequence: Synthetic oligonucleotide"
  source: /note="Description of Combined DNA/RNA Molecule: Synthetic oligonucleotide"
ucuaauauuccaggacauatt

SEQ ID NO: 359 - DNA, 21 bp, Artificial Sequence
  source: /note="Description of Artificial Sequence: Synthetic oligonucleotide"
  source: /note="Description of Combined DNA/RNA Molecule: Synthetic oligonucleotide"
cuaauauuccaggacauactt

SEQ ID NO: 360 - DNA, 21 bp, Artificial Sequence
  source: /note="Description of Artificial Sequence: Synthetic oligonucleotide"
  source: /note="Description of Combined DNA/RNA Molecule: Synthetic oligonucleotide"
aacuuucguucugaagggutt

SEQ ID NO: 361 - DNA, 21 bp, Artificial Sequence
  source: /note="Description of Artificial Sequence: Synthetic oligonucleotide"
  source: /note="Description of Combined DNA/RNA Molecule: Synthetic oligonucleotide"
ugaaauuacaauauugggctt

SEQ ID NO: 362 - DNA, 21 bp, Artificial Sequence
  source: /note="Description of Artificial Sequence: Synthetic oligonucleotide"
  source: /note="Description of Combined DNA/RNA Molecule: Synthetic oligonucleotide"
ucucccacuuugauggucctt

SEQ ID NO: 363 - DNA, 21 bp, Artificial Sequence
  source: /note="Description of Artificial Sequence: Synthetic oligonucleotide"
  source: /note="Description of Combined DNA/RNA Molecule: Synthetic oligonucleotide"
ugcccaaagaguggugauutt

SEQ ID NO: 364 - DNA, 21 bp, Artificial Sequence
  source: /note="Description of Artificial Sequence: Synthetic oligonucleotide"
  source: /note="Description of Combined DNA/RNA Molecule: Synthetic oligonucleotide"
caaaauacugcccaaagagtt

SEQ ID NO: 365 - DNA, 21 bp, Artificial Sequence
  source: /note="Description of Artificial Sequence: Synthetic oligonucleotide"
  source: /note="Description of Combined DNA/RNA Molecule: Synthetic oligonucleotide"
ucugcauagacaucgcauctt

SEQ ID NO: 366 - DNA, 21 bp, Artificial Sequence
  source: /note="Description of Artificial Sequence: Synthetic oligonucleotide"
  source: /note="Description of Combined DNA/RNA Molecule: Synthetic oligonucleotide"
caaagaguggugauuuucctt

SEQ ID NO: 367 - DNA, 21 bp, Artificial Sequence
  source: /note="Description of Artificial Sequence: Synthetic oligonucleotide"
  source: /note="Description of Combined DNA/RNA Molecule: Synthetic oligonucleotide"
ugucauuuuugagaacauutt

SEQ ID NO: 368 - DNA, 21 bp, Artificial Sequence
  source: /note="Description of Artificial Sequence: Synthetic oligonucleotide"
  source: /note="Description of Combined DNA/RNA Molecule: Synthetic oligonucleotide"
guugaucacaagccaaaactt

SEQ ID NO: 369 - DNA, 21 bp, Artificial Sequence
  source: /note="Description of Artificial Sequence: Synthetic oligonucleotide"
  source: /note="Description of Combined DNA/RNA Molecule: Synthetic oligonucleotide"
acugaaucacuuuucuucutt

SEQ ID NO: 370 - DNA, 21 bp, Artificial Sequence
  source: /note="Description of Artificial Sequence: Synthetic oligonucleotide"
  source: /note="Description of Combined DNA/RNA Molecule: Synthetic oligonucleotide"
aaaaauauacuucaucagatt

SEQ ID NO: 371 - DNA, 21 bp, Artificial Sequence
  source: /note="Description of Artificial Sequence: Synthetic oligonucleotide"
  source: /note="Description of Combined DNA/RNA Molecule: Synthetic oligonucleotide"
gaaauuacaauauugggcctt

SEQ ID NO: 372 - DNA, 21 bp, Artificial Sequence
  source: /note="Description of Artificial Sequence: Synthetic oligonucleotide"
  source: /note="Description of Combined DNA/RNA Molecule: Synthetic oligonucleotide"
cugcauagacaucgcaucctt

SEQ ID NO: 373 - DNA, 21 bp, Artificial Sequence
  source: /note="Description of Artificial Sequence: Synthetic oligonucleotide"
  source: /note="Description of Combined DNA/RNA Molecule: Synthetic oligonucleotide"
ucauuuuugagaacauuuutt

SEQ ID NO: 374 - DNA, 21 bp, Artificial Sequence
  source: /note="Description of Artificial Sequence: Synthetic oligonucleotide"
  source: /note="Description of Combined DNA/RNA Molecule: Synthetic oligonucleotide"
aucgcauccugaaauuacatt

SEQ ID NO: 375 - DNA, 21 bp, Artificial Sequence
  source: /note="Description of Artificial Sequence: Synthetic oligonucleotide"
  source: /note="Description of Combined DNA/RNA Molecule: Synthetic oligonucleotide"
aacuauuccauaaucaguutt

SEQ ID NO: 376 - DNA, 21 bp, Artificial Sequence
  source: /note="Description of Artificial Sequence: Synthetic oligonucleotide"
  source: /note="Description of Combined DNA/RNA Molecule: Synthetic oligonucleotide"
aaacaccaugcuucaagugtt

SEQ ID NO: 377 - DNA, 21 bp, Artificial Sequence
  source: /note="Description of Artificial Sequence: Synthetic oligonucleotide"
  source: /note="Description of Combined DNA/RNA Molecule: Synthetic oligonucleotide"
aacaccaugcuucaagugutt

SEQ ID NO: 378 - DNA, 21 bp, Artificial Sequence
  source: /note="Description of Artificial Sequence: Synthetic oligonucleotide"
  source: /note="Description of Combined DNA/RNA Molecule: Synthetic oligonucleotide"
ucauuagcugaggggaaugtt

SEQ ID NO: 379 - DNA, 21 bp, Artificial Sequence
  source: /note="Description of Artificial Sequence: Synthetic oligonucleotide"
  source: /note="Description of Combined DNA/RNA Molecule: Synthetic oligonucleotide"
gauaacucuucaguguuuctt

SEQ ID NO: 380 - DNA, 21 bp, Artificial Sequence
  source: /note="Description of Artificial Sequence: Synthetic oligonucleotide"
  source: /note="Description of Combined DNA/RNA Molecule: Synthetic oligonucleotide"
ugaguaagcaaucuggucctt

SEQ ID NO: 381 - DNA, 21 bp, Artificial Sequence
  source: /note="Description of Artificial Sequence: Synthetic oligonucleotide"
  source: /note="Description of Combined DNA/RNA Molecule: Synthetic oligonucleotide"
aaucaaaggacaaaauggctt

SEQ ID NO: 382 - DNA, 21 bp, Artificial Sequence
  source: /note="Description of Artificial Sequence: Synthetic oligonucleotide"
  source: /note="Description of Combined DNA/RNA Molecule: Synthetic oligonucleotide"
aaaauacugcccaaagagutt

SEQ ID NO: 383 - DNA, 21 bp, Artificial Sequence
  source: /note="Description of Artificial Sequence: Synthetic oligonucleotide"
  source: /note="Description of Combined DNA/RNA Molecule: Synthetic oligonucleotide"
uccuccugagcaccuuuagtt

SEQ ID NO: 384 - DNA, 21 bp, Artificial Sequence
  source: /note="Description of Artificial Sequence: Synthetic oligonucleotide"
  source: /note="Description of Combined DNA/RNA Molecule: Synthetic oligonucleotide"
ucugaagggucacacuggctt

SEQ ID NO: 385 - DNA, 21 bp, Artificial Sequence
  source: /note="Description of Artificial Sequence: Synthetic oligonucleotide"
  source: /note="Description of Combined DNA/RNA Molecule: Synthetic oligonucleotide"
cugaaucacuuuucuucuctt

SEQ ID NO: 386 - DNA, 21 bp, Artificial Sequence
  source: /note="Description of Artificial Sequence: Synthetic oligonucleotide"
  source: /note="Description of Combined DNA/RNA Molecule: Synthetic oligonucleotide"
cauguuucccuccugguugtt

SEQ ID NO: 387 - DNA, 21 bp, Artificial Sequence
  source: /note="Description of Artificial Sequence: Synthetic oligonucleotide"
  source: /note="Description of Combined DNA/RNA Molecule: Synthetic oligonucleotide"
ugcuuuaacuuucuucucutt

SEQ ID NO: 388 - DNA, 21 bp, Artificial Sequence
  source: /note="Description of Artificial Sequence: Synthetic oligonucleotide"
  source: /note="Description of Combined DNA/RNA Molecule: Synthetic oligonucleotide"
guacacagggucucccacutt

SEQ ID NO: 389 - DNA, 21 bp, Artificial Sequence
  source: /note="Description of Artificial Sequence: Synthetic oligonucleotide"
  source: /note="Description of Combined DNA/RNA Molecule: Synthetic oligonucleotide"
ccuuuaggaaauccaaugctt

SEQ ID NO: 390 - DNA, 21 bp, Artificial Sequence
  source: /note="Description of Artificial Sequence: Synthetic oligonucleotide"
  source: /note="Description of Combined DNA/RNA Molecule: Synthetic oligonucleotide"
aaugcaucuggaacaagcctt

SEQ ID NO: 391 - DNA, 21 bp, Artificial Sequence
  source: /note="Description of Artificial Sequence: Synthetic oligonucleotide"
  source: /note="Description of Combined DNA/RNA Molecule: Synthetic oligonucleotide"
gagcaccuuuaggaaaucctt

SEQ ID NO: 392 - DNA, 21 bp, Artificial Sequence
  source: /note="Description of Artificial Sequence: Synthetic oligonucleotide"
  source: /note="Description of Combined DNA/RNA Molecule: Synthetic oligonucleotide"
uuucguucugaagggucactt

SEQ ID NO: 393 - DNA, 21 bp, Artificial Sequence
  source: /note="Description of Artificial Sequence: Synthetic oligonucleotide"
  source: /note="Description of Combined DNA/RNA Molecule: Synthetic oligonucleotide"
ggaaauccaaugcugucugtt

SEQ ID NO: 394 - DNA, 21 bp, Artificial Sequence
  source: /note="Description of Artificial Sequence: Synthetic oligonucleotide"
  source: /note="Description of Combined DNA/RNA Molecule: Synthetic oligonucleotide"
uccacugugguuaaaaugctt

SEQ ID NO: 395 - DNA, 21 bp, Artificial Sequence
  source: /note="Description of Artificial Sequence: Synthetic oligonucleotide"
  source: /note="Description of Combined DNA/RNA Molecule: Synthetic oligonucleotide"
aaucacuuuucuucuccuctt

SEQ ID NO: 396 - DNA, 21 bp, Artificial Sequence
  source: /note="Description of Artificial Sequence: Synthetic oligonucleotide"
  source: /note="Description of Combined DNA/RNA Molecule: Synthetic oligonucleotide"
gugauuuuccauauaacuutt

SEQ ID NO: 397 - DNA, 21 bp, Artificial Sequence
  source: /note="Description of Artificial Sequence: Synthetic oligonucleotide"
  source: /note="Description of Combined DNA/RNA Molecule: Synthetic oligonucleotide"
ggugauuuuccauauaacutt

SEQ ID NO: 398 - DNA, 21 bp, Artificial Sequence
  source: /note="Description of Artificial Sequence: Synthetic oligonucleotide"
  source: /note="Description of Combined DNA/RNA Molecule: Synthetic oligonucleotide"
agauauuggguuuuaaacatt

SEQ ID NO: 399 - DNA, 21 bp, Artificial Sequence
  source: /note="Description of Artificial Sequence: Synthetic oligonucleotide"
  source: /note="Description of Combined DNA/RNA Molecule: Synthetic oligonucleotide"
uuccacgucaccaauaagatt

SEQ ID NO: 400 - DNA, 21 bp, Artificial Sequence
  source: /note="Description of Artificial Sequence: Synthetic oligonucleotide"
  source: /note="Description of Combined DNA/RNA Molecule: Synthetic oligonucleotide"
acuuucguucugaaggguctt

SEQ ID NO: 401 - DNA, 21 bp, Artificial Sequence
  source: /note="Description of Artificial Sequence: Synthetic oligonucleotide"
  source: /note="Description of Combined DNA/RNA Molecule: Synthetic oligonucleotide"
acuucaucagaucuuagagtt

SEQ ID NO: 402 - DNA, 21 bp, Artificial Sequence
  source: /note="Description of Artificial Sequence: Synthetic oligonucleotide"
  source: /note="Description of Combined DNA/RNA Molecule: Synthetic oligonucleotide"
uauacuucaucagaucuuatt

SEQ ID NO: 403 - DNA, 21 bp, Artificial Sequence
  source: /note="Description of Artificial Sequence: Synthetic oligonucleotide"
  source: /note="Description of Combined DNA/RNA Molecule: Synthetic oligonucleotide"
acugcccaaagaguggugatt

SEQ ID NO: 404 - DNA, 21 bp, Artificial Sequence
  source: /note="Description of Artificial Sequence: Synthetic oligonucleotide"
  source: /note="Description of Combined DNA/RNA Molecule: Synthetic oligonucleotide"
uaagcaaucugguccuuggtt

SEQ ID NO: 405 - DNA, 21 bp, Artificial Sequence
  source: /note="Description of Artificial Sequence: Synthetic oligonucleotide"
  source: /note="Description of Combined DNA/RNA Molecule: Synthetic oligonucleotide"
guuaaaaugcaucuggaactt

SEQ ID NO: 406 - DNA, 21 bp, Artificial Sequence
  source: /note="Description of Artificial Sequence: Synthetic oligonucleotide"
  source: /note="Description of Combined DNA/RNA Molecule: Synthetic oligonucleotide"
acauuuuucaaguuuaguctt

SEQ ID NO: 407 - DNA, 21 bp, Artificial Sequence
  source: /note="Description of Artificial Sequence: Synthetic oligonucleotide"
  source: /note="Description of Combined DNA/RNA Molecule: Synthetic oligonucleotide"
ugcauagacaucgcauccutt

SEQ ID NO: 408 - DNA, 21 bp, Artificial Sequence
  source: /note="Description of Artificial Sequence: Synthetic oligonucleotide"
  source: /note="Description of Combined DNA/RNA Molecule: Synthetic oligonucleotide"
accuuuaggaaauccaaugtt

SEQ ID NO: 409 - DNA, 21 bp, Artificial Sequence
  source: /note="Description of Artificial Sequence: Synthetic oligonucleotide"
  source: /note="Description of Combined DNA/RNA Molecule: Synthetic oligonucleotide"
aaauauacuucaucagauctt

SEQ ID NO: 410 - DNA, 21 bp, Artificial Sequence
  source: /note="Description of Artificial Sequence: Synthetic oligonucleotide"
  source: /note="Description of Combined DNA/RNA Molecule: Synthetic oligonucleotide"
gucaaaguagcuuccauuutt

SEQ ID NO: 411 - DNA, 21 bp, Artificial Sequence
  source: /note="Description of Artificial Sequence: Synthetic oligonucleotide"
  source: /note="Description of Combined DNA/RNA Molecule: Synthetic oligonucleotide"
cuucaucagaucuuagagutt

SEQ ID NO: 412 - DNA, 21 bp, Artificial Sequence
  source: /note="Description of Artificial Sequence: Synthetic oligonucleotide"
  source: /note="Description of Combined DNA/RNA Molecule: Synthetic oligonucleotide"
cugaguaagcaaucugguctt

SEQ ID NO: 413 - DNA, 21 bp, Artificial Sequence
  source: /note="Description of Artificial Sequence: Synthetic oligonucleotide"
  source: /note="Description of Combined DNA/RNA Molecule: Synthetic oligonucleotide"
gucucccacuuugaugguctt

SEQ ID NO: 414 - DNA, 21 bp, Artificial Sequence
  source: /note="Description of Artificial Sequence: Synthetic oligonucleotide"
  source: /note="Description of Combined DNA/RNA Molecule: Synthetic oligonucleotide"
caaguuuagucaacuuccctt

SEQ ID NO: 415 - DNA, 21 bp, Artificial Sequence
  source: /note="Description of Artificial Sequence: Synthetic oligonucleotide"
  source: /note="Description of Combined DNA/RNA Molecule: Synthetic oligonucleotide"
agaacuauuccauaaucagtt

SEQ ID NO: 416 - DNA, 21 bp, Artificial Sequence
  source: /note="Description of Artificial Sequence: Synthetic oligonucleotide"
  source: /note="Description of Combined DNA/RNA Molecule: Synthetic oligonucleotide"
gaaucacuuuucuucuccutt

SEQ ID NO: 417 - DNA, 21 bp, Artificial Sequence
  source: /note="Description of Artificial Sequence: Synthetic oligonucleotide"
  source: /note="Description of Combined DNA/RNA Molecule: Synthetic oligonucleotide"
uaaucaaaggacaaaauggtt

SEQ ID NO: 418 - DNA, 21 bp, Artificial Sequence
  source: /note="Description of Artificial Sequence: Synthetic oligonucleotide"
  source: /note="Description of Combined DNA/RNA Molecule: Synthetic oligonucleotide"
gucauuuuugagaacauuutt

SEQ ID NO: 419 - DNA, 21 bp, Artificial Sequence
  source: /note="Description of Artificial Sequence: Synthetic oligonucleotide"
  source: /note="Description of Combined DNA/RNA Molecule: Synthetic oligonucleotide"
uuaaaaugcaucuggaacatt

SEQ ID NO: 420 - DNA, 21 bp, Artificial Sequence
  source: /note="Description of Artificial Sequence: Synthetic oligonucleotide"
  source: /note="Description of Combined DNA/RNA Molecule: Synthetic oligonucleotide"
guucccauuacuggcccagtt

SEQ ID NO: 421 - DNA, 21 bp, Artificial Sequence
  source: /note="Description of Artificial Sequence: Synthetic oligonucleotide"
  source: /note="Description of Combined DNA/RNA Molecule: Synthetic oligonucleotide"
ucugaguaagcaaucuggutt

SEQ ID NO: 422 - DNA, 21 bp, Artificial Sequence
  source: /note="Description of Artificial Sequence: Synthetic oligonucleotide"
  source: /note="Description of Combined DNA/RNA Molecule: Synthetic oligonucleotide"
cauuucaaaagcuagcccgtt

SEQ ID NO: 423 - DNA, 21 bp, Artificial Sequence
  source: /note="Description of Artificial Sequence: Synthetic oligonucleotide"
  source: /note="Description of Combined DNA/RNA Molecule: Synthetic oligonucleotide"
accucugcauagacaucgctt

SEQ ID NO: 424 - DNA, 21 bp, Artificial Sequence
  source: /note="Description of Artificial Sequence: Synthetic oligonucleotide"
  source: /note="Description of Combined DNA/RNA Molecule: Synthetic oligonucleotide"
uucaaaagcuagcccggggtt

SEQ ID NO: 425 - DNA, 21 bp, Artificial Sequence
  source: /note="Description of Artificial Sequence: Synthetic oligonucleotide"
  source: /note="Description of Combined DNA/RNA Molecule: Synthetic oligonucleotide"
ccaaagaguggugauuuuctt

SEQ ID NO: 426 - DNA, 21 bp, Artificial Sequence
  source: /note="Description of Artificial Sequence: Synthetic oligonucleotide"
  source: /note="Description of Combined DNA/RNA Molecule: Synthetic oligonucleotide"
uggcgauaacucuucagugtt

SEQ ID NO: 427 - DNA, 21 bp, Artificial Sequence
  source: /note="Description of Artificial Sequence: Synthetic oligonucleotide"
  source: /note="Description of Combined DNA/RNA Molecule: Synthetic oligonucleotide"
aaaauauacuucaucagautt

SEQ ID NO: 428 - DNA, 21 bp, Artificial Sequence
  source: /note="Description of Artificial Sequence: Synthetic oligonucleotide"
  source: /note="Description of Combined DNA/RNA Molecule: Synthetic oligonucleotide"
auagacaucgcauccugaatt

SEQ ID NO: 429 - DNA, 21 bp, Artificial Sequence
  source: /note="Description of Artificial Sequence: Synthetic oligonucleotide"
  source: /note="Description of Combined DNA/RNA Molecule: Synthetic oligonucleotide"
agggaaaucaggaccaggctt

SEQ ID NO: 430 - DNA, 21 bp, Artificial Sequence
  source: /note="Description of Artificial Sequence: Synthetic oligonucleotide"
  source: /note="Description of Combined DNA/RNA Molecule: Synthetic oligonucleotide"
acaccaugcuucaaguguutt

SEQ ID NO: 431 - DNA, 21 bp, Artificial Sequence
  source: /note="Description of Artificial Sequence: Synthetic oligonucleotide"
  source: /note="Description of Combined DNA/RNA Molecule: Synthetic oligonucleotide"
aaguuuagucaacuucccatt

SEQ ID NO: 432 - DNA, 21 bp, Artificial Sequence
  source: /note="Description of Artificial Sequence: Synthetic oligonucleotide"
  source: /note="Description of Combined DNA/RNA Molecule: Synthetic oligonucleotide"
caucgcauccugaaauuactt

SEQ ID NO: 433 - DNA, 21 bp, Artificial Sequence
  source: /note="Description of Artificial Sequence: Synthetic oligonucleotide"
  source: /note="Description of Combined DNA/RNA Molecule: Synthetic oligonucleotide"
ucaaguuuagucaacuucctt

SEQ ID NO: 434 - DNA, 21 bp, Artificial Sequence
  source: /note="Description of Artificial Sequence: Synthetic oligonucleotide"
  source: /note="Description of Combined DNA/RNA Molecule: Synthetic oligonucleotide"
caccaugcuucaaguguugtt

SEQ ID NO: 435 - DNA, 21 bp, Artificial Sequence
  source: /note="Description of Artificial Sequence: Synthetic oligonucleotide"
  source: /note="Description of Combined DNA/RNA Molecule: Synthetic oligonucleotide"
aaacauuuuucaaguuuagtt

SEQ ID NO: 436 - DNA, 21 bp, Artificial Sequence
  source: /note="Description of Artificial Sequence: Synthetic oligonucleotide"
  source: /note="Description of Combined DNA/RNA Molecule: Synthetic oligonucleotide"
ucgcaugugaggcucgaagtt

SEQ ID NO: 437 - DNA, 21 bp, Artificial Sequence
  source: /note="Description of Artificial Sequence: Synthetic oligonucleotide"
  source: /note="Description of Combined DNA/RNA Molecule: Synthetic oligonucleotide"
aacucuucaguguuuccagtt

SEQ ID NO: 438 - DNA, 21 bp, Artificial Sequence
  source: /note="Description of Artificial Sequence: Synthetic oligonucleotide"
  source: /note="Description of Combined DNA/RNA Molecule: Synthetic oligonucleotide"
cacugaaucacuuuucuuctt

SEQ ID NO: 439 - DNA, 21 bp, Artificial Sequence
  source: /note="Description of Artificial Sequence: Synthetic oligonucleotide"
  source: /note="Description of Combined DNA/RNA Molecule: Synthetic oligonucleotide"
gacauugaagcauugagactt

SEQ ID NO: 440 - DNA, 21 bp, Artificial Sequence
  source: /note="Description of Artificial Sequence: Synthetic oligonucleotide"
  source: /note="Description of Combined DNA/RNA Molecule: Synthetic oligonucleotide"
uccaaugcugucugagaagtt

SEQ ID NO: 441 - DNA, 21 bp, Artificial Sequence
  source: /note="Description of Artificial Sequence: Synthetic oligonucleotide"
  source: /note="Description of Combined DNA/RNA Molecule: Synthetic oligonucleotide"
gaggggaauggcaaggauctt

SEQ ID NO: 442 - DNA, 21 bp, Artificial Sequence
  source: /note="Description of Artificial Sequence: Synthetic oligonucleotide"
  source: /note="Description of Combined DNA/RNA Molecule: Synthetic oligonucleotide"
auagauauuggguuuuaaatt

SEQ ID NO: 443 - DNA, 21 bp, Artificial Sequence
  source: /note="Description of Artificial Sequence: Synthetic oligonucleotide"
  source: /note="Description of Combined DNA/RNA Molecule: Synthetic oligonucleotide"
ucucaguucugaaacaccatt

SEQ ID NO: 444 - DNA, 21 bp, Artificial Sequence
  source: /note="Description of Artificial Sequence: Synthetic oligonucleotide"
  source: /note="Description of Combined DNA/RNA Molecule: Synthetic oligonucleotide"
cugaaaucacugaaucacutt

SEQ ID NO: 445 - DNA, 21 bp, Artificial Sequence
  source: /note="Description of Artificial Sequence: Synthetic oligonucleotide"
  source: /note="Description of Combined DNA/RNA Molecule: Synthetic oligonucleotide"
aggaaauccaaugcugucutt

SEQ ID NO: 446 - DNA, 21 bp, Artificial Sequence
  source: /note="Description of Artificial Sequence: Synthetic oligonucleotide"
  source: /note="Description of Combined DNA/RNA Molecule: Synthetic oligonucleotide"
guccacugugguuaaaaugtt

SEQ ID NO: 447 - DNA, 21 bp, Artificial Sequence
  source: /note="Description of Artificial Sequence: Synthetic oligonucleotide"
  source: /note="Description of Combined DNA/RNA Molecule: Synthetic oligonucleotide"
auauaacuuucguucugaatt

SEQ ID NO: 448 - DNA, 21 bp, Artificial Sequence
  source: /note="Description of Artificial Sequence: Synthetic oligonucleotide"
  source: /note="Description of Combined DNA/RNA Molecule: Synthetic oligonucleotide"
caggagaaagaacuauucctt

SEQ ID NO: 449 - DNA, 21 bp, Artificial Sequence
  source: /note="Description of Artificial Sequence: Synthetic oligonucleotide"
  source: /note="Description of Combined DNA/RNA Molecule: Synthetic oligonucleotide"
gaaguugguugcuuuaacutt

SEQ ID NO: 450 - DNA, 21 bp, Artificial Sequence
  source: /note="Description of Artificial Sequence: Synthetic oligonucleotide"
  source: /note="Description of Combined DNA/RNA Molecule: Synthetic oligonucleotide"
gucauuagcugaggggaautt

SEQ ID NO: 451 - DNA, 21 bp, Artificial Sequence
  source: /note="Description of Artificial Sequence: Synthetic oligonucleotide"
  source: /note="Description of Combined DNA/RNA Molecule: Synthetic oligonucleotide"
cuuuaacuuucuucucuagtt

SEQ ID NO: 452 - DNA, 21 bp, Artificial Sequence
  source: /note="Description of Artificial Sequence: Synthetic oligonucleotide"
  source: /note="Description of Combined DNA/RNA Molecule: Synthetic oligonucleotide"
aaaaaauauacuucaucagtt

SEQ ID NO: 453 - DNA, 21 bp, Artificial Sequence
  source: /note="Description of Artificial Sequence: Synthetic oligonucleotide"
  source: /note="Description of Combined DNA/RNA Molecule: Synthetic oligonucleotide"
aaaaaugugaaaaucacaatt

SEQ ID NO: 454 - DNA, 21 bp, Artificial Sequence
  source: /note="Description of Artificial Sequence: Synthetic oligonucleotide"
  source: /note="Description of Combined DNA/RNA Molecule: Synthetic oligonucleotide"
gucacacuggcgauaacuctt

SEQ ID NO: 455 - DNA, 21 bp, Artificial Sequence
  source: /note="Description of Artificial Sequence: Synthetic oligonucleotide"
  source: /note="Description of Combined DNA/RNA Molecule: Synthetic oligonucleotide"
ccaugcuucaaguguuguctt

SEQ ID NO: 456 - DNA, 21 bp, Artificial Sequence
  source: /note="Description of Artificial Sequence: Synthetic oligonucleotide"
  source: /note="Description of Combined DNA/RNA Molecule: Synthetic oligonucleotide"
aaauccaaugcugucugagtt

SEQ ID NO: 457 - DNA, 21 bp, Artificial Sequence
  source: /note="Description of Artificial Sequence: Synthetic oligonucleotide"
  source: /note="Description of Combined DNA/RNA Molecule: Synthetic oligonucleotide"
uccuuuucccccuuuaaagtt

SEQ ID NO: 458 - DNA, 21 bp, Artificial Sequence
  source: /note="Description of Artificial Sequence: Synthetic oligonucleotide"
  source: /note="Description of Combined DNA/RNA Molecule: Synthetic oligonucleotide"
gccagauccagaucuauggtt

SEQ ID NO: 459 - DNA, 21 bp, Artificial Sequence
  source: /note="Description of Artificial Sequence: Synthetic oligonucleotide"
  source: /note="Description of Combined DNA/RNA Molecule: Synthetic oligonucleotide"
ucagaauccugucuugucatt

SEQ ID NO: 460 - DNA, 21 bp, Artificial Sequence
  source: /note="Description of Artificial Sequence: Synthetic oligonucleotide"
  source: /note="Description of Combined DNA/RNA Molecule: Synthetic oligonucleotide"
cauugaagcauugagacactt

SEQ ID NO: 461 - DNA, 21 bp, Artificial Sequence
  source: /note="Description of Artificial Sequence: Synthetic oligonucleotide"
  source: /note="Description of Combined DNA/RNA Molecule: Synthetic oligonucleotide"
aagaacuauuccauaaucatt

SEQ ID NO: 462 - DNA, 21 bp, Artificial Sequence
  source: /note="Description of Artificial Sequence: Synthetic oligonucleotide"
  source: /note="Description of Combined DNA/RNA Molecule: Synthetic oligonucleotide"
aucuaauauuccaggacautt

SEQ ID NO: 463 - DNA, 21 bp, Artificial Sequence
  source: /note="Description of Artificial Sequence: Synthetic oligonucleotide"
  source: /note="Description of Combined DNA/RNA Molecule: Synthetic oligonucleotide"
gugguuaaaaugcaucuggtt

SEQ ID NO: 464 - DNA, 21 bp, Artificial Sequence
  source: /note="Description of Artificial Sequence: Synthetic oligonucleotide"
  source: /note="Description of Combined DNA/RNA Molecule: Synthetic oligonucleotide"
ucacuuuucuucuccuccatt

SEQ ID NO: 465 - DNA, 21 bp, Artificial Sequence
  source: /note="Description of Artificial Sequence: Synthetic oligonucleotide"
  source: /note="Description of Combined DNA/RNA Molecule: Synthetic oligonucleotide"
agcaccuuuaggaaauccatt

SEQ ID NO: 466 - DNA, 21 bp, Artificial Sequence
  source: /note="Description of Artificial Sequence: Synthetic oligonucleotide"
  source: /note="Description of Combined DNA/RNA Molecule: Synthetic oligonucleotide"
uccauauaacuuucguucutt

SEQ ID NO: 467 - DNA, 21 bp, Artificial Sequence
  source: /note="Description of Artificial Sequence: Synthetic oligonucleotide"
  source: /note="Description of Combined DNA/RNA Molecule: Synthetic oligonucleotide"
ccauuucaaaagcuagccctt

SEQ ID NO: 468 - DNA, 21 bp, Artificial Sequence
  source: /note="Description of Artificial Sequence: Synthetic oligonucleotide"
  source: /note="Description of Combined DNA/RNA Molecule: Synthetic oligonucleotide"
aauuacaauauugggccugtt

SEQ ID NO: 469 - DNA, 21 bp, Artificial Sequence
  source: /note="Description of Artificial Sequence: Synthetic oligonucleotide"
  source: /note="Description of Combined DNA/RNA Molecule: Synthetic oligonucleotide"
uggcaauaaaaaauauacutt

SEQ ID NO: 470 - DNA, 21 bp, Artificial Sequence
  source: /note="Description of Artificial Sequence: Synthetic oligonucleotide"
  source: /note="Description of Combined DNA/RNA Molecule: Synthetic oligonucleotide"
cacuuuucuucuccuccactt

SEQ ID NO: 471 - DNA, 21 bp, Artificial Sequence
  source: /note="Description of Artificial Sequence: Synthetic oligonucleotide"
  source: /note="Description of Combined DNA/RNA Molecule: Synthetic oligonucleotide"
gaguuuucagaauccuguctt

SEQ ID NO: 472 - DNA, 21 bp, Artificial Sequence
  source: /note="Description of Artificial Sequence: Synthetic oligonucleotide"
  source: /note="Description of Combined DNA/RNA Molecule: Synthetic oligonucleotide"
ucaaaguagcuuccauuuatt

SEQ ID NO: 473 - DNA, 21 bp, Artificial Sequence
  source: /note="Description of Artificial Sequence: Synthetic oligonucleotide"
  source: /note="Description of Combined DNA/RNA Molecule: Synthetic oligonucleotide"
cacgucaccaauaagaagctt

SEQ ID NO: 474 - DNA, 21 bp, Artificial Sequence
  source: /note="Description of Artificial Sequence: Synthetic oligonucleotide"
  source: /note="Description of Combined DNA/RNA Molecule: Synthetic oligonucleotide"
gaacuauuccauaaucagutt

SEQ ID NO: 475 - DNA, 21 bp, Artificial Sequence
  source: /note="Description of Artificial Sequence: Synthetic oligonucleotide"
  source: /note="Description of Combined DNA/RNA Molecule: Synthetic oligonucleotide"
gccauuucaaaagcuagcctt

SEQ ID NO: 476 - DNA, 21 bp, Artificial Sequence
  source: /note="Description of Artificial Sequence: Synthetic oligonucleotide"
  source: /note="Description of Combined DNA/RNA Molecule: Synthetic oligonucleotide"
uccauuuauucacaguuuutt

SEQ ID NO: 477 - DNA, 21 bp, Artificial Sequence
  source: /note="Description of Artificial Sequence: Synthetic oligonucleotide"
  source: /note="Description of Combined DNA/RNA Molecule: Synthetic oligonucleotide"
ugccauuucaaaagcuagctt

SEQ ID NO: 478 - DNA, 21 bp, Artificial Sequence
  source: /note="Description of Artificial Sequence: Synthetic oligonucleotide"
  source: /note="Description of Combined DNA/RNA Molecule: Synthetic oligonucleotide"
aucacugaaucacuuuucutt

SEQ ID NO: 479 - DNA, 21 bp, Artificial Sequence
  source: /note="Description of Artificial Sequence: Synthetic oligonucleotide"
  source: /note="Description of Combined DNA/RNA Molecule: Synthetic oligonucleotide"
uaggaaauccaaugcuguctt

SEQ ID NO: 480 - DNA, 21 bp, Artificial Sequence
  source: /note="Description of Artificial Sequence: Synthetic oligonucleotide"
  source: /note="Description of Combined DNA/RNA Molecule: Synthetic oligonucleotide"
aacauuuuucaaguuuagutt

SEQ ID NO: 481 - DNA, 21 bp, Artificial Sequence
  source: /note="Description of Artificial Sequence: Synthetic oligonucleotide"
  source: /note="Description of Combined DNA/RNA Molecule: Synthetic oligonucleotide"
acugggacauugaagcauutt

SEQ ID NO: 482 - DNA, 21 bp, Artificial Sequence
  source: /note="Description of Artificial Sequence: Synthetic oligonucleotide"
  source: /note="Description of Combined DNA/RNA Molecule: Synthetic oligonucleotide"
uccuuuguguaggcugcactt

SEQ ID NO: 483 - DNA, 21 bp, Artificial Sequence
  source: /note="Description of Artificial Sequence: Synthetic oligonucleotide"
  source: /note="Description of Combined DNA/RNA Molecule: Synthetic oligonucleotide"
auuucaaaagcuagcccggtt

SEQ ID NO: 484 - DNA, 21 bp, Artificial Sequence
  source: /note="Description of Artificial Sequence: Synthetic oligonucleotide"
  source: /note="Description of Combined DNA/RNA Molecule: Synthetic oligonucleotide"
agucaaaguagcuuccauutt

SEQ ID NO: 485 - DNA, 21 bp, Artificial Sequence
  source: /note="Description of Artificial Sequence: Synthetic oligonucleotide"
  source: /note="Description of Combined DNA/RNA Molecule: Synthetic oligonucleotide"
aggggaauggcaaggaucctt

SEQ ID NO: 486 - DNA, 21 bp, Artificial Sequence
  source: /note="Description of Artificial Sequence: Synthetic oligonucleotide"
  source: /note="Description of Combined DNA/RNA Molecule: Synthetic oligonucleotide"
uccagaucuauggaaaauutt

SEQ ID NO: 487 - DNA, 21 bp, Artificial Sequence
  source: /note="Description of Artificial Sequence: Synthetic oligonucleotide"
  source: /note="Description of Combined DNA/RNA Molecule: Synthetic oligonucleotide"
ucaggaagcugguuauccatt

SEQ ID NO: 488 - DNA, 21 bp, Artificial Sequence
  source: /note="Description of Artificial Sequence: Synthetic oligonucleotide"
  source: /note="Description of Combined DNA/RNA Molecule: Synthetic oligonucleotide"
ccagcacaaaauacugccctt

SEQ ID NO: 489 - DNA, 21 bp, Artificial Sequence
  source: /note="Description of Artificial Sequence: Synthetic oligonucleotide"
  source: /note="Description of Combined DNA/RNA Molecule: Synthetic oligonucleotide"
uuccauuuauucacaguuutt

SEQ ID NO: 490 - DNA, 21 bp, Artificial Sequence
  source: /note="Description of Artificial Sequence: Synthetic oligonucleotide"
  source: /note="Description of Combined DNA/RNA Molecule: Synthetic oligonucleotide"
uaaccauguuucccuccugtt

SEQ ID NO: 491 - DNA, 21 bp, Artificial Sequence
  source: /note="Description of Artificial Sequence: Synthetic oligonucleotide"
  source: /note="Description of Combined DNA/RNA Molecule: Synthetic oligonucleotide"
gcaucuaauauuccaggactt

SEQ ID NO: 492 - DNA, 21 bp, Artificial Sequence
  source: /note="Description of Artificial Sequence: Synthetic oligonucleotide"
  source: /note="Description of Combined DNA/RNA Molecule: Synthetic oligonucleotide"
aauccaaugcugucugagatt

SEQ ID NO: 493 - DNA, 21 bp, Artificial Sequence
  source: /note="Description of Artificial Sequence: Synthetic oligonucleotide"
  source: /note="Description of Combined DNA/RNA Molecule: Synthetic oligonucleotide"
ccugaaggucaccucaguctt

SEQ ID NO: 494 - DNA, 21 bp, Artificial Sequence
  source: /note="Description of Artificial Sequence: Synthetic oligonucleotide"
  source: /note="Description of Combined DNA/RNA Molecule: Synthetic oligonucleotide"
aaagaacuauuccauaauctt

SEQ ID NO: 495 - DNA, 21 bp, Artificial Sequence
  source: /note="Description of Artificial Sequence: Synthetic oligonucleotide"
  source: /note="Description of Combined DNA/RNA Molecule: Synthetic oligonucleotide"
aucacuuuucuucuccucctt

SEQ ID NO: 496 - DNA, 21 bp, Artificial Sequence
  source: /note="Description of Artificial Sequence: Synthetic oligonucleotide"
  source: /note="Description of Combined DNA/RNA Molecule: Synthetic oligonucleotide"
ccuccugagcaccuuuaggtt

SEQ ID NO: 497 - DNA, 21 bp, Artificial Sequence
  source: /note="Description of Artificial Sequence: Synthetic oligonucleotide"
  source: /note="Description of Combined DNA/RNA Molecule: Synthetic oligonucleotide"
caucagaucuuagaguuautt

SEQ ID NO: 498 - DNA, 21 bp, Artificial Sequence
  source: /note="Description of Artificial Sequence: Synthetic oligonucleotide"
  source: /note="Description of Combined DNA/RNA Molecule: Synthetic oligonucleotide"
caaaguagcuuccauuuautt

SEQ ID NO: 499 - DNA, 21 bp, Artificial Sequence
  source: /note="Description of Artificial Sequence: Synthetic oligonucleotide"
  source: /note="Description of Combined DNA/RNA Molecule: Synthetic oligonucleotide"
acauugaagcauugagacatt

SEQ ID NO: 500 - DNA, 21 bp, Artificial Sequence
  source: /note="Description of Artificial Sequence: Synthetic oligonucleotide"
  source: /note="Description of Combined DNA/RNA Molecule: Synthetic oligonucleotide"
ccugguugaucacaagccatt

SEQ ID NO: 501 - DNA, 21 bp, Artificial Sequence
  source: /note="Description of Artificial Sequence: Synthetic oligonucleotide"
  source: /note="Description of Combined DNA/RNA Molecule: Synthetic oligonucleotide"
ggaguuuucagaauccugutt

SEQ ID NO: 502 - DNA, 21 bp, Artificial Sequence
  source: /note="Description of Artificial Sequence: Synthetic oligonucleotide"
  source: /note="Description of Combined DNA/RNA Molecule: Synthetic oligonucleotide"
auccaaugcugucugagaatt

SEQ ID NO: 503 - DNA, 21 bp, Artificial Sequence
  source: /note="Description of Artificial Sequence: Synthetic oligonucleotide"
  source: /note="Description of Combined DNA/RNA Molecule: Synthetic oligonucleotide"
ggccagauccagaucuaugtt

SEQ ID NO: 504 - DNA, 21 bp, Artificial Sequence
  source: /note="Description of Artificial Sequence: Synthetic oligonucleotide"
  source: /note="Description of Combined DNA/RNA Molecule: Synthetic oligonucleotide"
cguucugaagggucacacutt

SEQ ID NO: 505 - DNA, 21 bp, Artificial Sequence
  source: /note="Description of Artificial Sequence: Synthetic oligonucleotide"
  source: /note="Description of Combined DNA/RNA Molecule: Synthetic oligonucleotide"
cgaaaaaugugaaaaucactt

SEQ ID NO: 506 - DNA, 21 bp, Artificial Sequence
  source: /note="Description of Artificial Sequence: Synthetic oligonucleotide"
  source: /note="Description of Combined DNA/RNA Molecule: Synthetic oligonucleotide"
acuggcgauaacucuucagtt

SEQ ID NO: 507 - DNA, 21 bp, Artificial Sequence
  source: /note="Description of Artificial Sequence: Synthetic oligonucleotide"
  source: /note="Description of Combined DNA/RNA Molecule: Synthetic oligonucleotide"
aauggcaaggauccaggggtt

SEQ ID NO: 508 - DNA, 21 bp, Artificial Sequence
  source: /note="Description of Artificial Sequence: Synthetic oligonucleotide"
  source: /note="Description of Combined DNA/RNA Molecule: Synthetic oligonucleotide"
gcaaucugguccuuggguctt

SEQ ID NO: 509 - DNA, 21 bp, Artificial Sequence
  source: /note="Description of Artificial Sequence: Synthetic oligonucleotide"
  source: /note="Description of Combined DNA/RNA Molecule: Synthetic oligonucleotide"
ugcauuuguggugggcguutt

SEQ ID NO: 510 - DNA, 21 bp, Artificial Sequence
  source: /note="Description of Artificial Sequence: Synthetic oligonucleotide"
  source: /note="Description of Combined DNA/RNA Molecule: Synthetic oligonucleotide"
ucgcauccugaaauuacaatt

SEQ ID NO: 511 - DNA, 21 bp, Artificial Sequence
  source: /note="Description of Artificial Sequence: Synthetic oligonucleotide"
  source: /note="Description of Combined DNA/RNA Molecule: Synthetic oligonucleotide"
ggaacuggagaaggagcactt

SEQ ID NO: 512 - DNA, 21 bp, Artificial Sequence
  source: /note="Description of Artificial Sequence: Synthetic oligonucleotide"
  source: /note="Description of Combined DNA/RNA Molecule: Synthetic oligonucleotide"
aagcaaucugguccuugggtt

SEQ ID NO: 513 - DNA, 21 bp, Artificial Sequence
  source: /note="Description of Artificial Sequence: Synthetic oligonucleotide"
  source: /note="Description of Combined DNA/RNA Molecule: Synthetic oligonucleotide"
cuucaaguguugucauuuutt

SEQ ID NO: 514 - DNA, 21 bp, Artificial Sequence
  source: /note="Description of Artificial Sequence: Synthetic oligonucleotide"
  source: /note="Description of Combined DNA/RNA Molecule: Synthetic oligonucleotide"
ccaaugcugucugagaagctt

SEQ ID NO: 515 - DNA, 21 bp, Artificial Sequence
  source: /note="Description of Artificial Sequence: Synthetic oligonucleotide"
  source: /note="Description of Combined DNA/RNA Molecule: Synthetic oligonucleotide"
gcugugacuucaggaagcutt

SEQ ID NO: 516 - DNA, 21 bp, Artificial Sequence
  source: /note="Description of Artificial Sequence: Synthetic oligonucleotide"
  source: /note="Description of Combined DNA/RNA Molecule: Synthetic oligonucleotide"
cuuccauuuauucacaguutt

SEQ ID NO: 517 - DNA, 21 bp, Artificial Sequence
  source: /note="Description of Artificial Sequence: Synthetic oligonucleotide"
  source: /note="Description of Combined DNA/RNA Molecule: Synthetic oligonucleotide"
ggucacacuggcgauaacutt

SEQ ID NO: 518 - DNA, 21 bp, Artificial Sequence
  source: /note="Description of Artificial Sequence: Synthetic oligonucleotide"
  source: /note="Description of Combined DNA/RNA Molecule: Synthetic oligonucleotide"
ccugaaauuacaauauuggtt

SEQ ID NO: 519 - DNA, 21 bp, Artificial Sequence
  source: /note="Description of Artificial Sequence: Synthetic oligonucleotide"
  source: /note="Description of Combined DNA/RNA Molecule: Synthetic oligonucleotide"
aaggacaaaauggcaauaatt

SEQ ID NO: 520 - DNA, 21 bp, Artificial Sequence
  source: /note="Description of Artificial Sequence: Synthetic oligonucleotide"
  source: /note="Description of Combined DNA/RNA Molecule: Synthetic oligonucleotide"
ggaacaagucugcuauuugtt

SEQ ID NO: 521 - DNA, 21 bp, Artificial Sequence
  source: /note="Description of Artificial Sequence: Synthetic oligonucleotide"
  source: /note="Description of Combined DNA/RNA Molecule: Synthetic oligonucleotide"
agcgacgccucagaaaggatt

SEQ ID NO: 522 - DNA, 21 bp, Artificial Sequence
  source: /note="Description of Artificial Sequence: Synthetic oligonucleotide"
  source: /note="Description of Combined DNA/RNA Molecule: Synthetic oligonucleotide"
ccagauccagaucuauggatt

SEQ ID NO: 523 - DNA, 21 bp, Artificial Sequence
  source: /note="Description of Artificial Sequence: Synthetic oligonucleotide"
  source: /note="Description of Combined DNA/RNA Molecule: Synthetic oligonucleotide"
cccacuuugauggucccugtt

SEQ ID NO: 524 - DNA, 21 bp, Artificial Sequence
  source: /note="Description of Artificial Sequence: Synthetic oligonucleotide"
  source: /note="Description of Combined DNA/RNA Molecule: Synthetic oligonucleotide"
ccacuuugauggucccuggtt

SEQ ID NO: 525 - DNA, 21 bp, Artificial Sequence
  source: /note="Description of Artificial Sequence: Synthetic oligonucleotide"
  source: /note="Description of Combined DNA/RNA Molecule: Synthetic oligonucleotide"
acccacucuuccucuuucutt

SEQ ID NO: 526 - DNA, 21 bp, Artificial Sequence
  source: /note="Description of Artificial Sequence: Synthetic oligonucleotide"
  source: /note="Description of Combined DNA/RNA Molecule: Synthetic oligonucleotide"
acucuucaguguuuccagctt

SEQ ID NO: 527 - DNA, 21 bp, Artificial Sequence
  source: /note="Description of Artificial Sequence: Synthetic oligonucleotide"
  source: /note="Description of Combined DNA/RNA Molecule: Synthetic oligonucleotide"
uagucaaaguagcuuccautt

SEQ ID NO: 528 - DNA, 21 bp, Artificial Sequence
  source: /note="Description of Artificial Sequence: Synthetic oligonucleotide"
  source: /note="Description of Combined DNA/RNA Molecule: Synthetic oligonucleotide"
auccagaucuauggaaaautt

SEQ ID NO: 529 - DNA, 21 bp, Artificial Sequence
  source: /note="Description of Artificial Sequence: Synthetic oligonucleotide"
  source: /note="Description of Combined DNA/RNA Molecule: Synthetic oligonucleotide"
gucggaacaagucugcuautt

SEQ ID NO: 530 - DNA, 21 bp, Artificial Sequence
  source: /note="Description of Artificial Sequence: Synthetic oligonucleotide"
  source: /note="Description of Combined DNA/RNA Molecule: Synthetic oligonucleotide"
gaaaucaggaccaggcgagtt

SEQ ID NO: 531 - DNA, 21 bp, Artificial Sequence
  source: /note="Description of Artificial Sequence: Synthetic oligonucleotide"
  source: /note="Description of Combined DNA/RNA Molecule: Synthetic oligonucleotide"
cuggcgauaacucuucagutt

SEQ ID NO: 532 - DNA, 21 bp, Artificial Sequence
  source: /note="Description of Artificial Sequence: Synthetic oligonucleotide"
  source: /note="Description of Combined DNA/RNA Molecule: Synthetic oligonucleotide"
ucccccuuuaaagguuuuctt

SEQ ID NO: 533 - DNA, 21 bp, Artificial Sequence
  source: /note="Description of Artificial Sequence: Synthetic oligonucleotide"
  source: /note="Description of Combined DNA/RNA Molecule: Synthetic oligonucleotide"
gcauagacaucgcauccugtt

SEQ ID NO: 534 - DNA, 21 bp, Artificial Sequence
  source: /note="Description of Artificial Sequence: Synthetic oligonucleotide"
  source: /note="Description of Combined DNA/RNA Molecule: Synthetic oligonucleotide"
gaaaucacugaaucacuuutt

SEQ ID NO: 535 - DNA, 21 bp, Artificial Sequence
  source: /note="Description of Artificial Sequence: Synthetic oligonucleotide"
  source: /note="Description of Combined DNA/RNA Molecule: Synthetic oligonucleotide"
gcuuccauuuauucacagutt

SEQ ID NO: 536 - DNA, 21 bp, Artificial Sequence
  source: /note="Description of Artificial Sequence: Synthetic oligonucleotide"
  source: /note="Description of Combined DNA/RNA Molecule: Synthetic oligonucleotide"
ccuccugguugaucacaagtt

SEQ ID NO: 537 - DNA, 21 bp, Artificial Sequence
  source: /note="Description of Artificial Sequence: Synthetic oligonucleotide"
  source: /note="Description of Combined DNA/RNA Molecule: Synthetic oligonucleotide"
gaaacaccaugcuucaagutt

SEQ ID NO: 538 - DNA, 21 bp, Artificial Sequence
  source: /note="Description of Artificial Sequence: Synthetic oligonucleotide"
  source: /note="Description of Combined DNA/RNA Molecule: Synthetic oligonucleotide"
acaauauugggccugaagutt

SEQ ID NO: 539 - DNA, 21 bp, Artificial Sequence
  source: /note="Description of Artificial Sequence: Synthetic oligonucleotide"
  source: /note="Description of Combined DNA/RNA Molecule: Synthetic oligonucleotide"
caggaagcugguuauccactt

SEQ ID NO: 540 - DNA, 21 bp, Artificial Sequence
  source: /note="Description of Artificial Sequence: Synthetic oligonucleotide"
  source: /note="Description of Combined DNA/RNA Molecule: Synthetic oligonucleotide"
gcuuccugaaggucaccuctt

SEQ ID NO: 541 - DNA, 21 bp, Artificial Sequence
  source: /note="Description of Artificial Sequence: Synthetic oligonucleotide"
  source: /note="Description of Combined DNA/RNA Molecule: Synthetic oligonucleotide"
ucacaguuuuaaaaacauutt

SEQ ID NO: 542 - DNA, 21 bp, Artificial Sequence
  source: /note="Description of Artificial Sequence: Synthetic oligonucleotide"
  source: /note="Description of Combined DNA/RNA Molecule: Synthetic oligonucleotide"
acaucgcauccugaaauuatt

SEQ ID NO: 543 - DNA, 21 bp, Artificial Sequence
  source: /note="Description of Artificial Sequence: Synthetic oligonucleotide"
  source: /note="Description of Combined DNA/RNA Molecule: Synthetic oligonucleotide"
ugugaaaaucacaaauuuatt

SEQ ID NO: 544 - DNA, 21 bp, Artificial Sequence
  source: /note="Description of Artificial Sequence: Synthetic oligonucleotide"
  source: /note="Description of Combined DNA/RNA Molecule: Synthetic oligonucleotide"
auuccauaaucaguuaaactt

SEQ ID NO: 545 - DNA, 21 bp, Artificial Sequence
  source: /note="Description of Artificial Sequence: Synthetic oligonucleotide"
  source: /note="Description of Combined DNA/RNA Molecule: Synthetic oligonucleotide"
cgacgccucagaaaggauctt

SEQ ID NO: 546 - DNA, 21 bp, Artificial Sequence
  source: /note="Description of Artificial Sequence: Synthetic oligonucleotide"
  source: /note="Description of Combined DNA/RNA Molecule: Synthetic oligonucleotide"
acaaaauacugcccaaagatt

SEQ ID NO: 547 - DNA, 21 bp, Artificial Sequence
  source: /note="Description of Artificial Sequence: Synthetic oligonucleotide"
  source: /note="Description of Combined DNA/RNA Molecule: Synthetic oligonucleotide"
cuuucguucugaagggucatt

SEQ ID NO: 548 - DNA, 21 bp, Artificial Sequence
  source: /note="Description of Artificial Sequence: Synthetic oligonucleotide"
  source: /note="Description of Combined DNA/RNA Molecule: Synthetic oligonucleotide"
aaaggacaaaauggcaauatt

SEQ ID NO: 549 - DNA, 21 bp, Artificial Sequence
  source: /note="Description of Artificial Sequence: Synthetic oligonucleotide"
  source: /note="Description of Combined DNA/RNA Molecule: Synthetic oligonucleotide"
ccuggguuuuccagcacaatt

SEQ ID NO: 550 - DNA, 21 bp, Artificial Sequence
  source: /note="Description of Artificial Sequence: Synthetic oligonucleotide"
  source: /note="Description of Combined DNA/RNA Molecule: Synthetic oligonucleotide"
acuauuccauaaucaguuatt

SEQ ID NO: 551 - DNA, 21 bp, Artificial Sequence
  source: /note="Description of Artificial Sequence: Synthetic oligonucleotide"
  source: /note="Description of Combined DNA/RNA Molecule: Synthetic oligonucleotide"
gcaggagaaagaacuauuctt

SEQ ID NO: 552 - DNA, 21 bp, Artificial Sequence
  source: /note="Description of Artificial Sequence: Synthetic oligonucleotide"
  source: /note="Description of Combined DNA/RNA Molecule: Synthetic oligonucleotide"
aguaaccauguuucccucctt

SEQ ID NO: 553 - DNA, 21 bp, Artificial Sequence
  source: /note="Description of Artificial Sequence: Synthetic oligonucleotide"
  source: /note="Description of Combined DNA/RNA Molecule: Synthetic oligonucleotide"
uuucaaaagcuagcccgggtt

SEQ ID NO: 554 - DNA, 21 bp, Artificial Sequence
  source: /note="Description of Artificial Sequence: Synthetic oligonucleotide"
  source: /note="Description of Combined DNA/RNA Molecule: Synthetic oligonucleotide"
aggagaaagaacuauuccatt

SEQ ID NO: 555 - DNA, 21 bp, Artificial Sequence
  source: /note="Description of Artificial Sequence: Synthetic oligonucleotide"
  source: /note="Description of Combined DNA/RNA Molecule: Synthetic oligonucleotide"
caccuuuaggaaauccaautt

SEQ ID NO: 556 - DNA, 21 bp, Artificial Sequence
  source: /note="Description of Artificial Sequence: Synthetic oligonucleotide"
  source: /note="Description of Combined DNA/RNA Molecule: Synthetic oligonucleotide"
cauuuuucaaguuuagucatt

SEQ ID NO: 557 - DNA, 21 bp, Artificial Sequence
  source: /note="Description of Artificial Sequence: Synthetic oligonucleotide"
  source: /note="Description of Combined DNA/RNA Molecule: Synthetic oligonucleotide"
acugcauuuguggugggcgtt

SEQ ID NO: 558 - DNA, 21 bp, Artificial Sequence
  source: /note="Description of Artificial Sequence: Synthetic oligonucleotide"
  source: /note="Description of Combined DNA/RNA Molecule: Synthetic oligonucleotide"
gcaggucagggaaaucaggtt

SEQ ID NO: 559 - DNA, 21 bp, Artificial Sequence
  source: /note="Description of Artificial Sequence: Synthetic oligonucleotide"
  source: /note="Description of Combined DNA/RNA Molecule: Synthetic oligonucleotide"
ucugaaacaccaugcuucatt

SEQ ID NO: 560 - DNA, 21 bp, Artificial Sequence
  source: /note="Description of Artificial Sequence: Synthetic oligonucleotide"
  source: /note="Description of Combined DNA/RNA Molecule: Synthetic oligonucleotide"
gggucggaacaagucugcutt

SEQ ID NO: 561 - DNA, 21 bp, Artificial Sequence
  source: /note="Description of Artificial Sequence: Synthetic oligonucleotide"
  source: /note="Description of Combined DNA/RNA Molecule: Synthetic oligonucleotide"
uaaaaaagaagucaaaucctt

SEQ ID NO: 562 - DNA, 21 bp, Artificial Sequence
  source: /note="Description of Artificial Sequence: Synthetic oligonucleotide"
  source: /note="Description of Combined DNA/RNA Molecule: Synthetic oligonucleotide"
gcaucuggaacaagccauctt

SEQ ID NO: 563 - DNA, 21 bp, Artificial Sequence
  source: /note="Description of Artificial Sequence: Synthetic oligonucleotide"
  source: /note="Description of Combined DNA/RNA Molecule: Synthetic oligonucleotide"
ccauauaacuuucguucugtt

SEQ ID NO: 564 - DNA, 21 bp, Artificial Sequence
  source: /note="Description of Artificial Sequence: Synthetic oligonucleotide"
  source: /note="Description of Combined DNA/RNA Molecule: Synthetic oligonucleotide"
agaaagaacuauuccauaatt

SEQ ID NO: 565 - DNA, 21 bp, Artificial Sequence
  source: /note="Description of Artificial Sequence: Synthetic oligonucleotide"
  source: /note="Description of Combined DNA/RNA Molecule: Synthetic oligonucleotide"
cucaguucugaaacaccautt

SEQ ID NO: 566 - DNA, 21 bp, Artificial Sequence
  source: /note="Description of Artificial Sequence: Synthetic oligonucleotide"
  source: /note="Description of Combined DNA/RNA Molecule: Synthetic oligonucleotide"
ggcaucuaauauuccaggatt

SEQ ID NO: 567 - DNA, 21 bp, Artificial Sequence
  source: /note="Description of Artificial Sequence: Synthetic oligonucleotide"
  source: /note="Description of Combined DNA/RNA Molecule: Synthetic oligonucleotide"
gaguaagcaaucugguccutt

SEQ ID NO: 568 - DNA, 21 bp, Artificial Sequence
  source: /note="Description of Artificial Sequence: Synthetic oligonucleotide"
  source: /note="Description of Combined DNA/RNA Molecule: Synthetic oligonucleotide"
gagagucagggugucaccatt

SEQ ID NO: 569 - DNA, 21 bp, Artificial Sequence
  source: /note="Description of Artificial Sequence: Synthetic oligonucleotide"
  source: /note="Description of Combined DNA/RNA Molecule: Synthetic oligonucleotide"
cuuaaaaaagaagucaaautt

SEQ ID NO: 570 - DNA, 21 bp, Artificial Sequence
  source: /note="Description of Artificial Sequence: Synthetic oligonucleotide"
  source: /note="Description of Combined DNA/RNA Molecule: Synthetic oligonucleotide"
uacaauauugggccugaagtt

SEQ ID NO: 571 - DNA, 21 bp, Artificial Sequence
  source: /note="Description of Artificial Sequence: Synthetic oligonucleotide"
  source: /note="Description of Combined DNA/RNA Molecule: Synthetic oligonucleotide"
cuagucaaaguagcuuccatt

SEQ ID NO: 572 - DNA, 21 bp, Artificial Sequence
  source: /note="Description of Artificial Sequence: Synthetic oligonucleotide"
  source: /note="Description of Combined DNA/RNA Molecule: Synthetic oligonucleotide"
gacuucaggaagcugguuatt

SEQ ID NO: 573 - DNA, 21 bp, Artificial Sequence
  source: /note="Description of Artificial Sequence: Synthetic oligonucleotide"
  source: /note="Description of Combined DNA/RNA Molecule: Synthetic oligonucleotide"
cauuuuugagaacauuuuutt

SEQ ID NO: 574 - DNA, 21 bp, Artificial Sequence
  source: /note="Description of Artificial Sequence: Synthetic oligonucleotide"
  source: /note="Description of Combined DNA/RNA Molecule: Synthetic oligonucleotide"
ggucggaacaagucugcuatt

SEQ ID NO: 575 - DNA, 21 bp, Artificial Sequence
  source: /note="Description of Artificial Sequence: Synthetic oligonucleotide"
  source: /note="Description of Combined DNA/RNA Molecule: Synthetic oligonucleotide"
cgucauuagcugaggggaatt

SEQ ID NO: 576 - DNA, 21 bp, Artificial Sequence
  source: /note="Description of Artificial Sequence: Synthetic oligonucleotide"
  source: /note="Description of Combined DNA/RNA Molecule: Synthetic oligonucleotide"
cagcacaaaauacugcccatt

SEQ ID NO: 577 - DNA, 21 bp, Artificial Sequence
  source: /note="Description of Artificial Sequence: Synthetic oligonucleotide"
  source: /note="Description of Combined DNA/RNA Molecule: Synthetic oligonucleotide"
agcaaucugguccuugggutt

SEQ ID NO: 578 - DNA, 21 bp, Artificial Sequence
  source: /note="Description of Artificial Sequence: Synthetic oligonucleotide"
  source: /note="Description of Combined DNA/RNA Molecule: Synthetic oligonucleotide"
acuagucaaaguagcuucctt

SEQ ID NO: 579 - DNA, 21 bp, Artificial Sequence
  source: /note="Description of Artificial Sequence: Synthetic oligonucleotide"
  source: /note="Description of Combined DNA/RNA Molecule: Synthetic oligonucleotide"
cugaaauuacaauauugggtt

SEQ ID NO: 580 - DNA, 21 bp, Artificial Sequence
  source: /note="Description of Artificial Sequence: Synthetic oligonucleotide"
  source: /note="Description of Combined DNA/RNA Molecule: Synthetic oligonucleotide"
cacaaaauacugcccaaagtt

SEQ ID NO: 581 - DNA, 21 bp, Artificial Sequence
  source: /note="Description of Artificial Sequence: Synthetic oligonucleotide"
  source: /note="Description of Combined DNA/RNA Molecule: Synthetic oligonucleotide"
gauauuggguuuuaaacaatt

SEQ ID NO: 582 - DNA, 21 bp, Artificial Sequence
  source: /note="Description of Artificial Sequence: Synthetic oligonucleotide"
  source: /note="Description of Combined DNA/RNA Molecule: Synthetic oligonucleotide"
cagggaaaucaggaccaggtt

SEQ ID NO: 583 - DNA, 21 bp, Artificial Sequence
  source: /note="Description of Artificial Sequence: Synthetic oligonucleotide"
  source: /note="Description of Combined DNA/RNA Molecule: Synthetic oligonucleotide"
gguuaaaaugcaucuggaatt

SEQ ID NO: 584 - DNA, 21 bp, Artificial Sequence
  source: /note="Description of Artificial Sequence: Synthetic oligonucleotide"
  source: /note="Description of Combined DNA/RNA Molecule: Synthetic oligonucleotide"
gcuucaaguguugucauuutt

SEQ ID NO: 585 - DNA, 21 bp, Artificial Sequence
  source: /note="Description of Artificial Sequence: Synthetic oligonucleotide"
  source: /note="Description of Combined DNA/RNA Molecule: Synthetic oligonucleotide"
gcauuccagccauauuuggtt

SEQ ID NO: 586 - DNA, 21 bp, Artificial Sequence
  source: /note="Description of Artificial Sequence: Synthetic oligonucleotide"
  source: /note="Description of Combined DNA/RNA Molecule: Synthetic oligonucleotide"
gggacauugaagcauugagtt

SEQ ID NO: 587 - DNA, 21 bp, Artificial Sequence
  source: /note="Description of Artificial Sequence: Synthetic oligonucleotide"
  source: /note="Description of Combined DNA/RNA Molecule: Synthetic oligonucleotide"
gugacuucaggaagcuggutt

SEQ ID NO: 588 - DNA, 21 bp, Artificial Sequence
  source: /note="Description of Artificial Sequence: Synthetic oligonucleotide"
  source: /note="Description of Combined DNA/RNA Molecule: Synthetic oligonucleotide"
aaagaagucaaauccaaggtt

SEQ ID NO: 589 - DNA, 21 bp, Artificial Sequence
  source: /note="Description of Artificial Sequence: Synthetic oligonucleotide"
  source: /note="Description of Combined DNA/RNA Molecule: Synthetic oligonucleotide"
cagauccagaucuauggaatt

SEQ ID NO: 590 - DNA, 21 bp, Artificial Sequence
  source: /note="Description of Artificial Sequence: Synthetic oligonucleotide"
  source: /note="Description of Combined DNA/RNA Molecule: Synthetic oligonucleotide"
caauauugggccugaaguutt

SEQ ID NO: 591 - DNA, 21 bp, Artificial Sequence
  source: /note="Description of Artificial Sequence: Synthetic oligonucleotide"
  source: /note="Description of Combined DNA/RNA Molecule: Synthetic oligonucleotide"
cacacuggcgauaacucuutt

SEQ ID NO: 592 - DNA, 21 bp, Artificial Sequence
  source: /note="Description of Artificial Sequence: Synthetic oligonucleotide"
  source: /note="Description of Combined DNA/RNA Molecule: Synthetic oligonucleotide"
cauagacaucgcauccugatt

SEQ ID NO: 593 - DNA, 21 bp, Artificial Sequence
  source: /note="Description of Artificial Sequence: Synthetic oligonucleotide"
  source: /note="Description of Combined DNA/RNA Molecule: Synthetic oligonucleotide"
ugguuaaaaugcaucuggatt

SEQ ID NO: 594 - DNA, 21 bp, Artificial Sequence
  source: /note="Description of Artificial Sequence: Synthetic oligonucleotide"
  source: /note="Description of Combined DNA/RNA Molecule: Synthetic oligonucleotide"
uccugaaggucaccucagutt

SEQ ID NO: 595 - DNA, 21 bp, Artificial Sequence
  source: /note="Description of Artificial Sequence: Synthetic oligonucleotide"
  source: /note="Description of Combined DNA/RNA Molecule: Synthetic oligonucleotide"
uuaaaaaagaagucaaauctt

SEQ ID NO: 596 - DNA, 21 bp, Artificial Sequence
  source: /note="Description of Artificial Sequence: Synthetic oligonucleotide"
  source: /note="Description of Combined DNA/RNA Molecule: Synthetic oligonucleotide"
ucagggaaaucaggaccagtt

SEQ ID NO: 597 - DNA, 21 bp, Artificial Sequence
  source: /note="Description of Artificial Sequence: Synthetic oligonucleotide"
  source: /note="Description of Combined DNA/RNA Molecule: Synthetic oligonucleotide"
ggcgauaacucuucagugutt

SEQ ID NO: 598 - DNA, 21 bp, Artificial Sequence
  source: /note="Description of Artificial Sequence: Synthetic oligonucleotide"
  source: /note="Description of Combined DNA/RNA Molecule: Synthetic oligonucleotide"
gcccaaagaguggugauuutt

SEQ ID NO: 599 - DNA, 21 bp, Artificial Sequence
  source: /note="Description of Artificial Sequence: Synthetic oligonucleotide"
  source: /note="Description of Combined DNA/RNA Molecule: Synthetic oligonucleotide"
acuuugauggucccugggutt

SEQ ID NO: 600 - DNA, 21 bp, Artificial Sequence
  source: /note="Description of Artificial Sequence: Synthetic oligonucleotide"
  source: /note="Description of Combined DNA/RNA Molecule: Synthetic oligonucleotide"
cacuuugauggucccugggtt

SEQ ID NO: 601 - DNA, 21 bp, Artificial Sequence
  source: /note="Description of Artificial Sequence: Synthetic oligonucleotide"
  source: /note="Description of Combined DNA/RNA Molecule: Synthetic oligonucleotide"
caugcuucaaguguugucatt

SEQ ID NO: 602 - DNA, 21 bp, Artificial Sequence
  source: /note="Description of Artificial Sequence: Synthetic oligonucleotide"
  source: /note="Description of Combined DNA/RNA Molecule: Synthetic oligonucleotide"
uccacgucaccaauaagaatt

SEQ ID NO: 603 - DNA, 21 bp, Artificial Sequence
  source: /note="Description of Artificial Sequence: Synthetic oligonucleotide"
  source: /note="Description of Combined DNA/RNA Molecule: Synthetic oligonucleotide"
gcaugugaggcucgaagugtt

SEQ ID NO: 604 - DNA, 21 bp, Artificial Sequence
  source: /note="Description of Artificial Sequence: Synthetic oligonucleotide"
  source: /note="Description of Combined DNA/RNA Molecule: Synthetic oligonucleotide"
ccacgucaccaauaagaagtt

SEQ ID NO: 605 - DNA, 21 bp, Artificial Sequence
  source: /note="Description of Artificial Sequence: Synthetic oligonucleotide"
  source: /note="Description of Combined DNA/RNA Molecule: Synthetic oligonucleotide"
ggagaaagaacuauuccautt

SEQ ID NO: 606 - DNA, 21 bp, Artificial Sequence
  source: /note="Description of Artificial Sequence: Synthetic oligonucleotide"
  source: /note="Description of Combined DNA/RNA Molecule: Synthetic oligonucleotide"
cccaaagaguggugauuuutt

SEQ ID NO: 607 - DNA, 21 bp, Artificial Sequence
  source: /note="Description of Artificial Sequence: Synthetic oligonucleotide"
  source: /note="Description of Combined DNA/RNA Molecule: Synthetic oligonucleotide"
aaaagaagucaaauccaagtt

SEQ ID NO: 608 - DNA, 21 bp, Artificial Sequence
  source: /note="Description of Artificial Sequence: Synthetic oligonucleotide"
  source: /note="Description of Combined DNA/RNA Molecule: Synthetic oligonucleotide"
caucuaauauuccaggacatt

SEQ ID NO: 609 - DNA, 21 bp, Artificial Sequence
  source: /note="Description of Artificial Sequence: Synthetic oligonucleotide"
  source: /note="Description of Combined DNA/RNA Molecule: Synthetic oligonucleotide"
guaaccauguuucccuccutt

SEQ ID NO: 610 - DNA, 21 bp, Artificial Sequence
  source: /note="Description of Artificial Sequence: Synthetic oligonucleotide"
  source: /note="Description of Combined DNA/RNA Molecule: Synthetic oligonucleotide"
ggccugaaguugguugcuutt

SEQ ID NO: 611 - DNA, 21 bp, Artificial Sequence
  source: /note="Description of Artificial Sequence: Synthetic oligonucleotide"
  source: /note="Description of Combined DNA/RNA Molecule: Synthetic oligonucleotide"
gguuuuaaacaacugacautt

SEQ ID NO: 612 - DNA, 21 bp, Artificial Sequence
  source: /note="Description of Artificial Sequence: Synthetic oligonucleotide"
  source: /note="Description of Combined DNA/RNA Molecule: Synthetic oligonucleotide"
guuuuaaacaacugacauatt

SEQ ID NO: 613 - DNA, 21 bp, Artificial Sequence
  source: /note="Description of Artificial Sequence: Synthetic oligonucleotide"
  source: /note="Description of Combined DNA/RNA Molecule: Synthetic oligonucleotide"
gacaucgcauccugaaauutt

SEQ ID NO: 614 - DNA, 21 bp, Artificial Sequence
  source: /note="Description of Artificial Sequence: Synthetic oligonucleotide"
  source: /note="Description of Combined DNA/RNA Molecule: Synthetic oligonucleotide"
uuacaauauugggccugaatt

SEQ ID NO: 615 - DNA, 21 bp, Artificial Sequence
  source: /note="Description of Artificial Sequence: Synthetic oligonucleotide"
  source: /note="Description of Combined DNA/RNA Molecule: Synthetic oligonucleotide"
gaaauccaaugcugucugatt

SEQ ID NO: 616 - DNA, 21 bp, Artificial Sequence
  source: /note="Description of Artificial Sequence: Synthetic oligonucleotide"
  source: /note="Description of Combined DNA/RNA Molecule: Synthetic oligonucleotide"
aaacuagucaaaguagcuutt

SEQ ID NO: 617 - DNA, 21 bp, Artificial Sequence
  source: /note="Description of Artificial Sequence: Synthetic oligonucleotide"
  source: /note="Description of Combined DNA/RNA Molecule: Synthetic oligonucleotide"
cucccacuuugaugguccctt

SEQ ID NO: 618 - DNA, 21 bp, Artificial Sequence
  source: /note="Description of Artificial Sequence: Synthetic oligonucleotide"
  source: /note="Description of Combined DNA/RNA Molecule: Synthetic oligonucleotide"
acugagagucagggugucatt

SEQ ID NO: 619 - DNA, 21 bp, Artificial Sequence
  source: /note="Description of Artificial Sequence: Synthetic oligonucleotide"
  source: /note="Description of Combined DNA/RNA Molecule: Synthetic oligonucleotide"
uccugaaauuacaauauugtt

SEQ ID NO: 620 - DNA, 21 bp, Artificial Sequence
  source: /note="Description of Artificial Sequence: Synthetic oligonucleotide"
  source: /note="Description of Combined DNA/RNA Molecule: Synthetic oligonucleotide"
gccugaaguugguugcuuutt

SEQ ID NO: 621 - DNA, 21 bp, Artificial Sequence
  source: /note="Description of Artificial Sequence: Synthetic oligonucleotide"
  source: /note="Description of Combined DNA/RNA Molecule: Synthetic oligonucleotide"
gcuggugucugaguaagcatt

SEQ ID NO: 622 - DNA, 21 bp, Artificial Sequence
  source: /note="Description of Artificial Sequence: Synthetic oligonucleotide"
  source: /note="Description of Combined DNA/RNA Molecule: Synthetic oligonucleotide"
aaauuacaauauugggccutt

SEQ ID NO: 623 - DNA, 21 bp, Artificial Sequence
  source: /note="Description of Artificial Sequence: Synthetic oligonucleotide"
  source: /note="Description of Combined DNA/RNA Molecule: Synthetic oligonucleotide"
agucaaauccaaggaaagatt

SEQ ID NO: 624 - DNA, 21 bp, Artificial Sequence
  source: /note="Description of Artificial Sequence: Synthetic oligonucleotide"
  source: /note="Description of Combined DNA/RNA Molecule: Synthetic oligonucleotide"
gguucccauuacuggcccatt

SEQ ID NO: 625 - DNA, 21 bp, Artificial Sequence
  source: /note="Description of Artificial Sequence: Synthetic oligonucleotide"
  source: /note="Description of Combined DNA/RNA Molecule: Synthetic oligonucleotide"
gggccugaaguugguugcutt

SEQ ID NO: 626 - DNA, 21 bp, Artificial Sequence
  source: /note="Description of Artificial Sequence: Synthetic oligonucleotide"
  source: /note="Description of Combined DNA/RNA Molecule: Synthetic oligonucleotide"
cccaagaauccuuaaaaaatt

SEQ ID NO: 627 - DNA, 21 bp, Artificial Sequence
  source: /note="Description of Artificial Sequence: Synthetic oligonucleotide"
  source: /note="Description of Combined DNA/RNA Molecule: Synthetic oligonucleotide"
aaaaaagaagucaaauccatt

SEQ ID NO: 628 - DNA, 21 bp, Artificial Sequence
  source: /note="Description of Artificial Sequence: Synthetic oligonucleotide"
  source: /note="Description of Combined DNA/RNA Molecule: Synthetic oligonucleotide"
ucccacuuugauggucccutt

SEQ ID NO: 629 - DNA, 21 bp, Artificial Sequence
  source: /note="Description of Artificial Sequence: Synthetic oligonucleotide"
  source: /note="Description of Combined DNA/RNA Molecule: Synthetic oligonucleotide"
cacugagagucaggguguctt

SEQ ID NO: 630 - DNA, 21 bp, Artificial Sequence
  source: /note="Description of Artificial Sequence: Synthetic oligonucleotide"
  source: /note="Description of Combined DNA/RNA Molecule: Synthetic oligonucleotide"
cugcauuuguggugggcgutt

SEQ ID NO: 631 - DNA, 21 bp, Artificial Sequence
  source: /note="Description of Artificial Sequence: Synthetic oligonucleotide"
  source: /note="Description of Combined DNA/RNA Molecule: Synthetic oligonucleotide"
acaaaauggcaauaaaaaatt

SEQ ID NO: 632 - DNA, 21 bp, Artificial Sequence
  source: /note="Description of Artificial Sequence: Synthetic oligonucleotide"
  source: /note="Description of Combined DNA/RNA Molecule: Synthetic oligonucleotide"
ccugagcaccuuuaggaaatt

SEQ ID NO: 633 - DNA, 21 bp, Artificial Sequence
  source: /note="Description of Artificial Sequence: Synthetic oligonucleotide"
  source: /note="Description of Combined DNA/RNA Molecule: Synthetic oligonucleotide"
cauuuauucacaguuuuaatt

SEQ ID NO: 634 - DNA, 21 bp, Artificial Sequence
  source: /note="Description of Artificial Sequence: Synthetic oligonucleotide"
  source: /note="Description of Combined DNA/RNA Molecule: Synthetic oligonucleotide"
gucaaauccaaggaaagautt

SEQ ID NO: 635 - DNA, 21 bp, Artificial Sequence
  source: /note="Description of Artificial Sequence: Synthetic oligonucleotide"
  source: /note="Description of Combined DNA/RNA Molecule: Synthetic oligonucleotide"
cugcccaaagaguggugautt

SEQ ID NO: 636 - DNA, 21 bp, Artificial Sequence
  source: /note="Description of Artificial Sequence: Synthetic oligonucleotide"
  source: /note="Description of Combined DNA/RNA Molecule: Synthetic oligonucleotide"
ggggaauggcaaggauccatt

SEQ ID NO: 637 - DNA, 21 bp, Artificial Sequence
  source: /note="Description of Artificial Sequence: Synthetic oligonucleotide"
  source: /note="Description of Combined DNA/RNA Molecule: Synthetic oligonucleotide"
cuuccugaaggucaccucatt

SEQ ID NO: 638 - DNA, 21 bp, Artificial Sequence
  source: /note="Description of Artificial Sequence: Synthetic oligonucleotide"
  source: /note="Description of Combined DNA/RNA Molecule: Synthetic oligonucleotide"
acgucaccaauaagaagcutt

SEQ ID NO: 639 - DNA, 21 bp, Artificial Sequence
  source: /note="Description of Artificial Sequence: Synthetic oligonucleotide"
  source: /note="Description of Combined DNA/RNA Molecule: Synthetic oligonucleotide"
gcacugagagucagggugutt

SEQ ID NO: 640 - DNA, 21 bp, Artificial Sequence
  source: /note="Description of Artificial Sequence: Synthetic oligonucleotide"
  source: /note="Description of Combined DNA/RNA Molecule: Synthetic oligonucleotide"
aaaaagaagucaaauccaatt

SEQ ID NO: 641 - DNA, 21 bp, Artificial Sequence
  source: /note="Description of Artificial Sequence: Synthetic oligonucleotide"
  source: /note="Description of Combined DNA/RNA Molecule: Synthetic oligonucleotide"
ggguuuuccagcacaaaautt

SEQ ID NO: 642 - DNA, 21 bp, Artificial Sequence
  source: /note="Description of Artificial Sequence: Synthetic oligonucleotide"
  source: /note="Description of Combined DNA/RNA Molecule: Synthetic oligonucleotide"
gcaauaaaaaauauacuuctt

SEQ ID NO: 643 - DNA, 21 bp, Artificial Sequence
  source: /note="Description of Artificial Sequence: Synthetic oligonucleotide"
  source: /note="Description of Combined DNA/RNA Molecule: Synthetic oligonucleotide"
ccuuuaaagguuuucaguatt

SEQ ID NO: 644 - DNA, 21 bp, Artificial Sequence
  source: /note="Description of Artificial Sequence: Synthetic oligonucleotide"
  source: /note="Description of Combined DNA/RNA Molecule: Synthetic oligonucleotide"
ucggaacaagucugcuauutt

SEQ ID NO: 645 - DNA, 21 bp, Artificial Sequence
  source: /note="Description of Artificial Sequence: Synthetic oligonucleotide"
  source: /note="Description of Combined DNA/RNA Molecule: Synthetic oligonucleotide"
caaaauggcaauaaaaaautt

SEQ ID NO: 646 - DNA, 21 bp, Artificial Sequence
  source: /note="Description of Artificial Sequence: Synthetic oligonucleotide"
  source: /note="Description of Combined DNA/RNA Molecule: Synthetic oligonucleotide"
agcacaaaauacugcccaatt

SEQ ID NO: 647 - DNA, 21 bp, Artificial Sequence
  source: /note="Description of Artificial Sequence: Synthetic oligonucleotide"
  source: /note="Description of Combined DNA/RNA Molecule: Synthetic oligonucleotide"
ggacauugaagcauugagatt

SEQ ID NO: 648 - DNA, 21 bp, Artificial Sequence
  source: /note="Description of Artificial Sequence: Synthetic oligonucleotide"
  source: /note="Description of Combined DNA/RNA Molecule: Synthetic oligonucleotide"
gugaaaaucacaaauuuaatt

SEQ ID NO: 649 - DNA, 21 bp, Artificial Sequence
  source: /note="Description of Artificial Sequence: Synthetic oligonucleotide"
  source: /note="Description of Combined DNA/RNA Molecule: Synthetic oligonucleotide"
cauauaacuuucguucugatt

SEQ ID NO: 650 - DNA, 21 bp, Artificial Sequence
  source: /note="Description of Artificial Sequence: Synthetic oligonucleotide"
  source: /note="Description of Combined DNA/RNA Molecule: Synthetic oligonucleotide"
aggacaaaauggcaauaaatt

SEQ ID NO: 651 - DNA, 21 bp, Artificial Sequence
  source: /note="Description of Artificial Sequence: Synthetic oligonucleotide"
  source: /note="Description of Combined DNA/RNA Molecule: Synthetic oligonucleotide"
gcacaaaauacugcccaaatt

SEQ ID NO: 652 - DNA, 21 bp, Artificial Sequence
  source: /note="Description of Artificial Sequence: Synthetic oligonucleotide"
  source: /note="Description of Combined DNA/RNA Molecule: Synthetic oligonucleotide"
cacaguuuuaaaaacauuutt

SEQ ID NO: 653 - DNA, 21 bp, Artificial Sequence
  source: /note="Description of Artificial Sequence: Synthetic oligonucleotide"
  source: /note="Description of Combined DNA/RNA Molecule: Synthetic oligonucleotide"
cccuuuaaagguuuucagutt

SEQ ID NO: 654 - DNA, 21 bp, Artificial Sequence
  source: /note="Description of Artificial Sequence: Synthetic oligonucleotide"
  source: /note="Description of Combined DNA/RNA Molecule: Synthetic oligonucleotide"
cccuccugguugaucacaatt

SEQ ID NO: 655 - DNA, 21 bp, Artificial Sequence
  source: /note="Description of Artificial Sequence: Synthetic oligonucleotide"
  source: /note="Description of Combined DNA/RNA Molecule: Synthetic oligonucleotide"
cacaaauuuaaagaaaaugtt

SEQ ID NO: 656 - DNA, 21 bp, Artificial Sequence
  source: /note="Description of Artificial Sequence: Synthetic oligonucleotide"
  source: /note="Description of Combined DNA/RNA Molecule: Synthetic oligonucleotide"
ccaagaauccuuaaaaaagtt

SEQ ID NO: 657 - DNA, 21 bp, Artificial Sequence
  source: /note="Description of Artificial Sequence: Synthetic oligonucleotide"
  source: /note="Description of Combined DNA/RNA Molecule: Synthetic oligonucleotide"
gcauuuguggugggcguuutt

SEQ ID NO: 658 - DNA, 21 bp, Artificial Sequence
  source: /note="Description of Artificial Sequence: Synthetic oligonucleotide"
  source: /note="Description of Combined DNA/RNA Molecule: Synthetic oligonucleotide"
cggaacaagucugcuauuutt

SEQ ID NO: 659 - DNA, 21 bp, Artificial Sequence
  source: /note="Description of Artificial Sequence: Synthetic oligonucleotide"
  source: /note="Description of Combined DNA/RNA Molecule: Synthetic oligonucleotide"
cgucaccaauaagaagcuctt

SEQ ID NO: 660 - DNA, 21 bp, Artificial Sequence
  source: /note="Description of Artificial Sequence: Synthetic oligonucleotide"
  source: /note="Description of Combined DNA/RNA Molecule: Synthetic oligonucleotide"
uauggaaaauuaauaucugtt

SEQ ID NO: 661 - DNA, 21 bp, Artificial Sequence
  source: /note="Description of Artificial Sequence: Synthetic oligonucleotide"
  source: /note="Description of Combined DNA/RNA Molecule: Synthetic oligonucleotide"
gcauccugaaauuacaauatt

SEQ ID NO: 662 - DNA, 21 bp, Artificial Sequence
  source: /note="Description of Artificial Sequence: Synthetic oligonucleotide"
  source: /note="Description of Combined DNA/RNA Molecule: Synthetic oligonucleotide"
gaaaaaugugaaaaucacatt

SEQ ID NO: 663 - DNA, 21 bp, Artificial Sequence
  source: /note="Description of Artificial Sequence: Synthetic oligonucleotide"
  source: /note="Description of Combined DNA/RNA Molecule: Synthetic oligonucleotide"
ccuuuucaguuccacgucatt

SEQ ID NO: 664 - DNA, 21 bp, Artificial Sequence
  source: /note="Description of Artificial Sequence: Synthetic oligonucleotide"
  source: /note="Description of Combined DNA/RNA Molecule: Synthetic oligonucleotide"
cacccacucuuccucuuuctt

SEQ ID NO: 665 - DNA, 21 bp, Artificial Sequence
  source: /note="Description of Artificial Sequence: Synthetic oligonucleotide"
  source: /note="Description of Combined DNA/RNA Molecule: Synthetic oligonucleotide"
gaagucaaauccaaggaaatt

SEQ ID NO: 666 - DNA, 21 bp, Artificial Sequence
  source: /note="Description of Artificial Sequence: Synthetic oligonucleotide"
  source: /note="Description of Combined DNA/RNA Molecule: Synthetic oligonucleotide"
gacgccucagaaaggaucatt

SEQ ID NO: 667 - DNA, 21 bp, Artificial Sequence
  source: /note="Description of Artificial Sequence: Synthetic oligonucleotide"
  source: /note="Description of Combined DNA/RNA Molecule: Synthetic oligonucleotide"
guuaccucugcauagacautt

SEQ ID NO: 668 - DNA, 21 bp, Artificial Sequence
  source: /note="Description of Artificial Sequence: Synthetic oligonucleotide"
  source: /note="Description of Combined DNA/RNA Molecule: Synthetic oligonucleotide"
auuacaauauugggccugatt

SEQ ID NO: 669 - DNA, 21 bp, Artificial Sequence
  source: /note="Description of Artificial Sequence: Synthetic oligonucleotide"
  source: /note="Description of Combined DNA/RNA Molecule: Synthetic oligonucleotide"
gaaaaucacaaauuuaaagtt

SEQ ID NO: 670 - DNA, 21 bp, Artificial Sequence
  source: /note="Description of Artificial Sequence: Synthetic oligonucleotide"
  source: /note="Description of Combined DNA/RNA Molecule: Synthetic oligonucleotide"
gaauccuuaaaaaagaagutt

SEQ ID NO: 671 - DNA, 21 bp, Artificial Sequence
  source: /note="Description of Artificial Sequence: Synthetic oligonucleotide"
  source: /note="Description of Combined DNA/RNA Molecule: Synthetic oligonucleotide"
gucgcaugugaggcucgaatt

SEQ ID NO: 672 - DNA, 21 bp, Artificial Sequence
  source: /note="Description of Artificial Sequence: Synthetic oligonucleotide"
  source: /note="Description of Combined DNA/RNA Molecule: Synthetic oligonucleotide"
gauccagaucuauggaaaatt

SEQ ID NO: 673 - DNA, 21 bp, Artificial Sequence
  source: /note="Description of Artificial Sequence: Synthetic oligonucleotide"
  source: /note="Description of Combined DNA/RNA Molecule: Synthetic oligonucleotide"
gagaaagaacuauuccauatt

SEQ ID NO: 674 - DNA, 21 bp, Artificial Sequence
  source: /note="Description of Artificial Sequence: Synthetic oligonucleotide"
  source: /note="Description of Combined DNA/RNA Molecule: Synthetic oligonucleotide"
cccuuuucaguuccacguctt

SEQ ID NO: 675 - DNA, 21 bp, Artificial Sequence
  source: /note="Description of Artificial Sequence: Synthetic oligonucleotide"
  source: /note="Description of Combined DNA/RNA Molecule: Synthetic oligonucleotide"
agaucuauggaaaauuaautt

SEQ ID NO: 676 - DNA, 21 bp, Artificial Sequence
  source: /note="Description of Artificial Sequence: Synthetic oligonucleotide"
  source: /note="Description of Combined DNA/RNA Molecule: Synthetic oligonucleotide"
guccuuuguguaggcugcatt

SEQ ID NO: 677 - DNA, 21 bp, Artificial Sequence
  source: /note="Description of Artificial Sequence: Synthetic oligonucleotide"
  source: /note="Description of Combined DNA/RNA Molecule: Synthetic oligonucleotide"
ccauguuucccuccugguutt

SEQ ID NO: 678 - DNA, 21 bp, Artificial Sequence
  source: /note="Description of Artificial Sequence: Synthetic oligonucleotide"
  source: /note="Description of Combined DNA/RNA Molecule: Synthetic oligonucleotide"
ccagaucuauggaaaauuatt

SEQ ID NO: 679 - DNA, 21 bp, Artificial Sequence
  source: /note="Description of Artificial Sequence: Synthetic oligonucleotide"
  source: /note="Description of Combined DNA/RNA Molecule: Synthetic oligonucleotide"
ggguuuuaaacaacugacatt

SEQ ID NO: 680 - DNA, 21 bp, Artificial Sequence
  source: /note="Description of Artificial Sequence: Synthetic oligonucleotide"
  source: /note="Description of Combined DNA/RNA Molecule: Synthetic oligonucleotide"
cugaaacaccaugcuucaatt

SEQ ID NO: 681 - DNA, 21 bp, Artificial Sequence
  source: /note="Description of Artificial Sequence: Synthetic oligonucleotide"
  source: /note="Description of Combined DNA/RNA Molecule: Synthetic oligonucleotide"
ggaaaucaggaccaggcgatt

SEQ ID NO: 682 - DNA, 21 bp, Artificial Sequence
  source: /note="Description of Artificial Sequence: Synthetic oligonucleotide"
  source: /note="Description of Combined DNA/RNA Molecule: Synthetic oligonucleotide"
ccauuuauucacaguuuuatt

SEQ ID NO: 683 - DNA, 21 bp, Artificial Sequence
  source: /note="Description of Artificial Sequence: Synthetic oligonucleotide"
  source: /note="Description of Combined DNA/RNA Molecule: Synthetic oligonucleotide"
gcaccuuuaggaaauccaatt

SEQ ID NO: 684 - DNA, 21 bp, Artificial Sequence
  source: /note="Description of Artificial Sequence: Synthetic oligonucleotide"
  source: /note="Description of Combined DNA/RNA Molecule: Synthetic oligonucleotide"
ggcaauaaaaaauauacuutt

SEQ ID NO: 685 - DNA, 21 bp, Artificial Sequence
  source: /note="Description of Artificial Sequence: Synthetic oligonucleotide"
  source: /note="Description of Combined DNA/RNA Molecule: Synthetic oligonucleotide"
gaucuauggaaaauuaauatt

SEQ ID NO: 686 - DNA, 21 bp, Artificial Sequence
  source: /note="Description of Artificial Sequence: Synthetic oligonucleotide"
  source: /note="Description of Combined DNA/RNA Molecule: Synthetic oligonucleotide"
cauccugaaauuacaauautt

SEQ ID NO: 687 - DNA, 21 bp, Artificial Sequence
  source: /note="Description of Artificial Sequence: Synthetic oligonucleotide"
  source: /note="Description of Combined DNA/RNA Molecule: Synthetic oligonucleotide"
gcgacgccucagaaaggautt

SEQ ID NO: 688 - DNA, 21 bp, Artificial Sequence
  source: /note="Description of Artificial Sequence: Synthetic oligonucleotide"
  source: /note="Description of Combined DNA/RNA Molecule: Synthetic oligonucleotide"
gacaaaauggcaauaaaaatt

SEQ ID NO: 689 - DNA, 21 bp, Artificial Sequence
  source: /note="Description of Artificial Sequence: Synthetic oligonucleotide"
  source: /note="Description of Combined DNA/RNA Molecule: Synthetic oligonucleotide"
gcuuuaacuuucuucucuatt

SEQ ID NO: 690 - DNA, 21 bp, Artificial Sequence
  source: /note="Description of Artificial Sequence: Synthetic oligonucleotide"
  source: /note="Description of Combined DNA/RNA Molecule: Synthetic oligonucleotide"
ccuuaaaaaagaagucaaatt

SEQ ID NO: 691 - DNA, 21 bp, Artificial Sequence
  source: /note="Description of Artificial Sequence: Synthetic oligonucleotide"
  source: /note="Description of Combined DNA/RNA Molecule: Synthetic oligonucleotide"
cacugcauuuguggugggctt

SEQ ID NO: 692 - DNA, 21 bp, Artificial Sequence
  source: /note="Description of Artificial Sequence: Synthetic oligonucleotide"
  source: /note="Description of Combined DNA/RNA Molecule: Synthetic oligonucleotide"
ccugaaguugguugcuuuatt

SEQ ID NO: 693 - DNA, 21 bp, Artificial Sequence
  source: /note="Description of Artificial Sequence: Synthetic oligonucleotide"
  source: /note="Description of Combined DNA/RNA Molecule: Synthetic oligonucleotide"
cugaaguugguugcuuuaatt

SEQ ID NO: 694 - DNA, 21 bp, Artificial Sequence
  source: /note="Description of Artificial Sequence: Synthetic oligonucleotide"
  source: /note="Description of Combined DNA/RNA Molecule: Synthetic oligonucleotide"
gguccuugggucggaacaatt

SEQ ID NO: 695 - DNA, 21 bp, Artificial Sequence
  source: /note="Description of Artificial Sequence: Synthetic oligonucleotide"
  source: /note="Description of Combined DNA/RNA Molecule: Synthetic oligonucleotide"
cagaucuauggaaaauuaatt

SEQ ID NO: 696 - DNA, 21 bp, Artificial Sequence
  source: /note="Description of Artificial Sequence: Synthetic oligonucleotide"
  source: /note="Description of Combined DNA/RNA Molecule: Synthetic oligonucleotide"
gcgauaacucuucaguguutt

SEQ ID NO: 697 - DNA, 21 bp, Artificial Sequence
  source: /note="Description of Artificial Sequence: Synthetic oligonucleotide"
  source: /note="Description of Combined DNA/RNA Molecule: Synthetic oligonucleotide"
aauccuuaaaaaagaaguctt

SEQ ID NO: 698 - DNA, 21 bp, Artificial Sequence
  source: /note="Description of Artificial Sequence: Synthetic oligonucleotide"
  source: /note="Description of Combined DNA/RNA Molecule: Synthetic oligonucleotide"
auccuuaaaaaagaagucatt

SEQ ID NO: 699 - DNA, 21 bp, Artificial Sequence
  source: /note="Description of Artificial Sequence: Synthetic oligonucleotide"
  source: /note="Description of Combined DNA/RNA Molecule: Synthetic oligonucleotide"
uccuuaaaaaagaagucaatt

SEQ ID NO: 700 - DNA, 21 bp, Artificial Sequence
  source: /note="Description of Artificial Sequence: Synthetic oligonucleotide"
  source: /note="Description of Combined DNA/RNA Molecule: Synthetic oligonucleotide"
cgauaacucuucaguguuutt

SEQ ID NO: 701 - DNA, 21 bp, Artificial Sequence
  source: /note="Description of Artificial Sequence: Synthetic oligonucleotide"
  source: /note="Description of Combined DNA/RNA Molecule: Synthetic oligonucleotide"
gaaagaacuauuccauaautt

SEQ ID NO: 702 - DNA, 21 bp, Artificial Sequence
  source: /note="Description of Artificial Sequence: Synthetic oligonucleotide"
  source: /note="Description of Combined DNA/RNA Molecule: Synthetic oligonucleotide"
aucccaagaauccuuaaaatt

SEQ ID NO: 703 - DNA, 21 bp, Artificial Sequence
  source: /note="Description of Artificial Sequence: Synthetic oligonucleotide"
  source: /note="Description of Combined DNA/RNA Molecule: Synthetic oligonucleotide"
caagaauccuuaaaaaagatt

SEQ ID NO: 704 - DNA, 21 bp, Artificial Sequence
  source: /note="Description of Artificial Sequence: Synthetic oligonucleotide"
  source: /note="Description of Combined DNA/RNA Molecule: Synthetic oligonucleotide"
ucccaagaauccuuaaaaatt

SEQ ID NO: 705 - DNA, 21 bp, Artificial Sequence
  source: /note="Description of Artificial Sequence: Synthetic oligonucleotide"
  source: /note="Description of Combined DNA/RNA Molecule: Synthetic oligonucleotide"
gguccacugugguuaaaautt

SEQ ID NO: 706 - DNA, 21 bp, Artificial Sequence
  source: /note="Description of Artificial Sequence: Synthetic oligonucleotide"
  source: /note="Description of Combined DNA/RNA Molecule: Synthetic oligonucleotide"
ggacaaaauggcaauaaaatt

SEQ ID NO: 707 - RNA, 19 nt, Homo sapiens
ccuucagaacgaaaguuau

SEQ ID NO: 708 - RNA, 19 nt, Homo sapiens
gaacgaaaguuauauggaa

SEQ ID NO: 709 - RNA, 19 nt, Homo sapiens
guuuaaaacccaauaucua

SEQ ID NO: 710 - RNA, 19 nt, Homo sapiens
uauguccuggaauauuaga

SEQ ID NO: 711 - RNA, 19 nt, Homo sapiens
guauguccuggaauauuag

SEQ ID NO: 712 - RNA, 19 nt, Homo sapiens
acccuucagaacgaaaguu

SEQ ID NO: 713 - RNA, 19 nt, Homo sapiens
gcccaauauuguaauuuca

SEQ ID NO: 714 - RNA, 19 nt, Homo sapiens
ggaccaucaaagugggaga

SEQ ID NO: 715 - RNA, 19 nt, Homo sapiens
aaucaccacucuuugggca

SEQ ID NO: 716 - RNA, 19 nt, Homo sapiens
cucuuugggcaguauuuug

SEQ ID NO: 717 - RNA, 19 nt, Homo sapiens
gaugcgaugucuaugcaga

SEQ ID NO: 718 - RNA, 19 nt, Homo sapiens
ggaaaaucaccacucuuug

SEQ ID NO: 719 - RNA, 19 nt, Homo sapiens
aauguucucaaaaaugaca

SEQ ID NO: 720 - RNA, 19 nt, Homo sapiens
guuuuggcuugugaucaac

SEQ ID NO: 721 - RNA, 19 nt, Homo sapiens
agaagaaaagugauucagu

SEQ ID NO: 722 - RNA, 19 nt, Homo sapiens
ucugaugaaguauauuuuu

SEQ ID NO: 723 - RNA, 19 nt, Homo sapiens
ggcccaauauuguaauuuc

SEQ ID NO: 724 - RNA, 19 nt, Homo sapiens
ggaugcgaugucuaugcag

SEQ ID NO: 725 - RNA, 19 nt, Homo sapiens
aaaauguucucaaaaauga

SEQ ID NO: 726 - RNA, 19 nt, Homo sapiens
uguaauuucaggaugcgau

SEQ ID NO: 727 - RNA, 19 nt, Homo sapiens
aacugauuauggaauaguu

SEQ ID NO: 728 - RNA, 19 nt, Homo sapiens
cacuugaagcaugguguuu

SEQ ID NO: 729 - RNA, 19 nt, Homo sapiens
acacuugaagcaugguguu

SEQ ID NO: 730 - RNA, 19 nt, Homo sapiens
cauuccccucagcuaauga

SEQ ID NO: 731 - RNA, 19 nt, Homo sapiens
gaaacacugaagaguuauc

SEQ ID NO: 732 - RNA, 19 nt, Homo sapiens
ggaccagauugcuuacuca

SEQ ID NO: 733 - RNA, 19 nt, Homo sapiens
gccauuuuguccuuugauu

SEQ ID NO: 734 - RNA, 19 nt, Homo sapiens
acucuuugggcaguauuuu

SEQ ID NO: 735 - RNA, 19 nt, Homo sapiens
cuaaaggugcucaggagga

SEQ ID NO: 736 - RNA, 19 nt, Homo sapiens
gccagugugacccuucaga

SEQ ID NO: 737 - RNA, 19 nt, Homo sapiens
gagaagaaaagugauucag

SEQ ID NO: 738 - RNA, 19 nt, Homo sapiens
caaccaggagggaaacaug

SEQ ID NO: 739 - RNA, 19 nt, Homo sapiens
agagaagaaaguuaaagca

SEQ ID NO: 740 - RNA, 19 nt, Homo sapiens
agugggagacccuguguac

SEQ ID NO: 741 - RNA, 19 nt, Homo sapiens
gcauuggauuuccuaaagg

SEQ ID NO: 742 - RNA, 19 nt, Homo sapiens
ggcuuguuccagaugcauu

SEQ ID NO: 743 - RNA, 19 nt, Homo sapiens
ggauuuccuaaaggugcuc

SEQ ID NO: 744 - RNA, 19 nt, Homo sapiens
gugacccuucagaacgaaa

SEQ ID NO: 745 - RNA, 19 nt, Homo sapiens
cagacagcauuggauuucc

SEQ ID NO: 746 - RNA, 19 nt, Homo sapiens
gcauuuuaaccacagugga

SEQ ID NO: 747 - RNA, 19 nt, Homo sapiens
gaggagaagaaaagugauu

SEQ ID NO: 748 - RNA, 19 nt, Homo sapiens
aaguuauauggaaaaucac

SEQ ID NO: 749 - RNA, 19 nt, Homo sapiens
aguuauauggaaaaucacc

SEQ ID NO: 750 - RNA, 19 nt, Homo sapiens
uguuuaaaacccaauaucu

SEQ ID NO: 751 - RNA, 19 nt, Homo sapiens
ucuuauuggugacguggaa

SEQ ID NO: 752 - RNA, 19 nt, Homo sapiens
gacccuucagaacgaaagu

SEQ ID NO: 753 - RNA, 19 nt, Homo sapiens
cucuaagaucugaugaagu

SEQ ID NO: 754 - RNA, 19 nt, Homo sapiens
uaagaucugaugaaguaua

SEQ ID NO: 755 - RNA, 19 nt, Homo sapiens
ucaccacucuuugggcagu

SEQ ID NO: 756 - RNA, 19 nt, Homo sapiens
ccaaggaccagauugcuua

SEQ ID NO: 757 - RNA, 19 nt, Homo sapiens
guuccagaugcauuuuaac

SEQ ID NO: 758 - RNA, 19 nt, Homo sapiens
gacuaaacuugaaaaaugu

SEQ ID NO: 759 - RNA, 19 nt, Homo sapiens
aggaugcgaugucuaugca

SEQ ID NO: 760 - RNA, 19 nt, Homo sapiens
cauuggauuuccuaaaggu

SEQ ID NO: 761 - RNA, 19 nt, Homo sapiens
gaucugaugaaguauauuu

SEQ ID NO: 762 - RNA, 19 nt, Homo sapiens
aaauggaagcuacuuugac

SEQ ID NO: 763 - RNA, 19 nt, Homo sapiens
acucuaagaucugaugaag

SEQ ID NO: 764 - RNA, 19 nt, Homo sapiens
gaccagauugcuuacucag

SEQ ID NO: 765 - RNA, 19 nt, Homo sapiens
gaccaucaaagugggagac

SEQ ID NO: 766 - RNA, 19 nt, Homo sapiens
gggaaguugacuaaacuug

SEQ ID NO: 767 - RNA, 19 nt, Homo sapiens
cugauuauggaauaguucu

SEQ ID NO: 768 - RNA, 19 nt, Homo sapiens
aggagaagaaaagugauuc

SEQ ID NO: 769 - RNA, 19 nt, Homo sapiens
ccauuuuguccuuugauua

SEQ ID NO: 770 - RNA, 19 nt, Homo sapiens
aaauguucucaaaaaugac

SEQ ID NO: 771 - RNA, 19 nt, Homo sapiens
uguuccagaugcauuuuaa

SEQ ID NO: 772 - RNA, 19 nt, Homo sapiens
cugggccaguaaugggaac

SEQ ID NO: 773 - RNA, 19 nt, Homo sapiens
accagauugcuuacucaga

SEQ ID NO: 774 - RNA, 19 nt, Homo sapiens
cgggcuagcuuuugaaaug

SEQ ID NO: 775 - RNA, 19 nt, Homo sapiens
gcgaugucuaugcagagga

SEQ ID NO: 776 - RNA, 19 nt, Homo sapiens
ccccgggcuagcuuuugaa

SEQ ID NO: 777 - RNA, 19 nt, Homo sapiens
gaaaaucaccacucuuugg

SEQ ID NO: 778 - RNA, 19 nt, Homo sapiens
cacugaagaguuaucgcca

SEQ ID NO: 779 - RNA, 19 nt, Homo sapiens
aucugaugaaguauauuuu

SEQ ID NO: 780 - RNA, 19 nt, Homo sapiens
uucaggaugcgaugucuau

SEQ ID NO: 781 - RNA, 19 nt, Homo sapiens
gccugguccugauuucccu

SEQ ID NO: 782 - RNA, 19 nt, Homo sapiens
aacacuugaagcauggugu

SEQ ID NO: 783 - RNA, 19 nt, Homo sapiens
ugggaaguugacuaaacuu

SEQ ID NO: 784 - RNA, 19 nt, Homo sapiens
guaauuucaggaugcgaug

SEQ ID NO: 785 - RNA, 19 nt, Homo sapiens
ggaaguugacuaaacuuga

SEQ ID NO: 786 - RNA, 19 nt, Homo sapiens
caacacuugaagcauggug

SEQ ID NO: 787 - RNA, 19 nt, Homo sapiens
cuaaacuugaaaaauguuu

SEQ ID NO: 788 - RNA, 19 nt, Homo sapiens
cuucgagccucacaugcga

SEQ ID NO: 789 - RNA, 19 nt, Homo sapiens
cuggaaacacugaagaguu

SEQ ID NO: 790 - RNA, 19 nt, Homo sapiens
gaagaaaagugauucagug

SEQ ID NO: 791 - RNA, 19 nt, Homo sapiens
gucucaaugcuucaauguc

SEQ ID NO: 792 - RNA, 19 nt, Homo sapiens
cuucucagacagcauugga

SEQ ID NO: 793 - RNA, 19 nt, Homo sapiens
gauccuugccauuccccuc

SEQ ID NO: 794 - RNA, 19 nt, Homo sapiens
uuuaaaacccaauaucuau

SEQ ID NO: 795 - RNA, 19 nt, Homo sapiens
ugguguuucagaacugaga

SEQ ID NO: 796 - RNA, 19 nt, Homo sapiens
agugauucagugauuucag

SEQ ID NO: 797 - RNA, 19 nt, Homo sapiens
agacagcauuggauuuccu

SEQ ID NO: 798 - RNA, 19 nt, Homo sapiens
cauuuuaaccacaguggac

SEQ ID NO: 799 - RNA, 19 nt, Homo sapiens
uucagaacgaaaguuauau

SEQ ID NO: 800 - RNA, 19 nt, Homo sapiens
ggaauaguucuuucuccug

SEQ ID NO: 801 - RNA, 19 nt, Homo sapiens
aguuaaagcaaccaacuuc

SEQ ID NO: 802 - RNA, 19 nt, Homo sapiens
auuccccucagcuaaugac

SEQ ID NO: 803 - RNA, 19 nt, Homo sapiens
cuagagaagaaaguuaaag

SEQ ID NO: 804 - RNA, 19 nt, Homo sapiens
cugaugaaguauauuuuuu

SEQ ID NO: 805 - RNA, 19 nt, Homo sapiens
uugugauuuucacauuuuu

SEQ ID NO: 806 - RNA, 19 nt, Homo sapiens
gaguuaucgccagugugac

SEQ ID NO: 807 - RNA, 19 nt, Homo sapiens
gacaacacuugaagcaugg

SEQ ID NO: 808 - RNA, 19 nt, Homo sapiens
cucagacagcauuggauuu

SEQ ID NO: 809 - RNA, 19 nt, Homo sapiens
cuuuaaagggggaaaagga

SEQ ID NO: 810 - RNA, 19 nt, Homo sapiens
ccauagaucuggaucuggc

SEQ ID NO: 811 - RNA, 19 nt, Homo sapiens
ugacaagacaggauucuga

SEQ ID NO: 812 - RNA, 19 nt, Homo sapiens
gugucucaaugcuucaaug

SEQ ID NO: 813 - RNA, 19 nt, Homo sapiens
ugauuauggaauaguucuu

SEQ ID NO: 814 - RNA, 19 nt, Homo sapiens
auguccuggaauauuagau

SEQ ID NO: 815 - RNA, 19 nt, Homo sapiens
ccagaugcauuuuaaccac

SEQ ID NO: 816 - RNA, 19 nt, Homo sapiens
uggaggagaagaaaaguga

SEQ ID NO: 817 - RNA, 19 nt, Homo sapiens
uggauuuccuaaaggugcu

SEQ ID NO: 818 - RNA, 19 nt, Homo sapiens
agaacgaaaguuauaugga

SEQ ID NO: 819 - RNA, 19 nt, Homo sapiens
gggcuagcuuuugaaaugg

SEQ ID NO: 820 - RNA, 19 nt, Homo sapiens
caggcccaauauuguaauu

SEQ ID NO: 821 - RNA, 19 nt, Homo sapiens
aguauauuuuuuauugcca

SEQ ID NO: 822 - RNA, 19 nt, Homo sapiens
guggaggagaagaaaagug

SEQ ID NO: 823 - RNA, 19 nt, Homo sapiens
gacaggauucugaaaacuc

SEQ ID NO: 824 - RNA, 19 nt, Homo sapiens
uaaauggaagcuacuuuga

SEQ ID NO: 825 - RNA, 19 nt, Homo sapiens
gcuucuuauuggugacgug

SEQ ID NO: 826 - RNA, 19 nt, Homo sapiens
acugauuauggaauaguuc

SEQ ID NO: 827 - RNA, 19 nt, Homo sapiens
ggcuagcuuuugaaauggc

SEQ ID NO: 828 - RNA, 19 nt, Homo sapiens
aaaacugugaauaaaugga

SEQ ID NO: 829 - RNA, 19 nt, Homo sapiens
gcuagcuuuugaaauggca

SEQ ID NO: 830 - RNA, 19 nt, Homo sapiens
agaaaagugauucagugau

SEQ ID NO: 831 - RNA, 19 nt, Homo sapiens
gacagcauuggauuuccua

SEQ ID NO: 832 - RNA, 19 nt, Homo sapiens
acuaaacuugaaaaauguu

SEQ ID NO: 833 - RNA, 19 nt, Homo sapiens
aaugcuucaaugucccagu

SEQ ID NO: 834 - RNA, 19 nt, Homo sapiens
gugcagccuacacaaagga

SEQ ID NO: 835 - RNA, 19 nt, Homo sapiens
ccgggcuagcuuuugaaau

SEQ ID NO: 836 - RNA, 19 nt, Homo sapiens
aauggaagcuacuuugacu

SEQ ID NO: 837 - RNA, 19 nt, Homo sapiens
ggauccuugccauuccccu

SEQ ID NO: 838 - RNA, 19 nt, Homo sapiens
aauuuuccauagaucugga

SEQ ID NO: 839 - RNA, 19 nt, Homo sapiens
uggauaaccagcuuccuga

SEQ ID NO: 840 - RNA, 19 nt, Homo sapiens
gggcaguauuuugugcugg

SEQ ID NO: 841 - RNA, 19 nt, Homo sapiens
aaacugugaauaaauggaa

SEQ ID NO: 842 - RNA, 19 nt, Homo sapiens
caggagggaaacaugguua

SEQ ID NO: 843 - RNA, 19 nt, Homo sapiens
guccuggaauauuagaugc

SEQ ID NO: 844 - RNA, 19 nt, Homo sapiens
ucucagacagcauuggauu

SEQ ID NO: 845 - RNA, 19 nt, Homo sapiens
gacugaggugaccuucagg

SEQ ID NO: 846 - RNA, 19 nt, Homo sapiens
gauuauggaauaguucuuu

SEQ ID NO: 847 - RNA, 19 nt, Homo sapiens
ggaggagaagaaaagugau

SEQ ID NO: 848 - RNA, 19 nt, Homo sapiens
ccuaaaggugcucaggagg

SEQ ID NO: 849 - RNA, 19 nt, Homo sapiens
auaacucuaagaucugaug

SEQ ID NO: 850 - RNA, 19 nt, Homo sapiens
auaaauggaagcuacuuug

SEQ ID NO: 851 - RNA, 19 nt, Homo sapiens
ugucucaaugcuucaaugu

SEQ ID NO: 852 - RNA, 19 nt, Homo sapiens
uggcuugugaucaaccagg

SEQ ID NO: 853 - RNA, 19 nt, Homo sapiens
acaggauucugaaaacucc

SEQ ID NO: 854 - RNA, 19 nt, Homo sapiens
uucucagacagcauuggau

SEQ ID NO: 855 - RNA, 19 nt, Homo sapiens
cauagaucuggaucuggcc

SEQ ID NO: 856 - RNA, 19 nt, Homo sapiens
agugugacccuucagaacg

SEQ ID NO: 857 - RNA, 19 nt, Homo sapiens
gugauuuucacauuuuucg

SEQ ID NO: 858 - RNA, 19 nt, Homo sapiens
cugaagaguuaucgccagu

SEQ ID NO: 859 - RNA, 19 nt, Homo sapiens
ccccuggauccuugccauu

SEQ ID NO: 860 - RNA, 19 nt, Homo sapiens
gacccaaggaccagauugc

SEQ ID NO: 861 - RNA, 19 nt, Homo sapiens
aacgcccaccacaaaugca

SEQ ID NO: 862 - RNA, 19 nt, Homo sapiens
uuguaauuucaggaugcga

SEQ ID NO: 863 - RNA, 19 nt, Homo sapiens
gugcuccuucuccaguucc

SEQ ID NO: 864 - RNA, 19 nt, Homo sapiens
cccaaggaccagauugcuu

SEQ ID NO: 865 - RNA, 19 nt, Homo sapiens
aaaaugacaacacuugaag

SEQ ID NO: 866 - RNA, 19 nt, Homo sapiens
gcuucucagacagcauugg

SEQ ID NO: 867 - RNA, 19 nt, Homo sapiens
agcuuccugaagucacagc

SEQ ID NO: 868 - RNA, 19 nt, Homo sapiens
aacugugaauaaauggaag

SEQ ID NO: 869 - RNA, 19 nt, Homo sapiens
aguuaucgccagugugacc

SEQ ID NO: 870 - RNA, 19 nt, Homo sapiens
ccaauauuguaauuucagg

SEQ ID NO: 871 - RNA, 19 nt, Homo sapiens
uuauugccauuuuguccuu

SEQ ID NO: 872 - RNA, 19 nt, Homo sapiens
caaauagcagacuuguucc

SEQ ID NO: 873 - RNA, 19 nt, Homo sapiens
uccuuucugaggcgucgcu

SEQ ID NO: 874 - RNA, 19 nt, Homo sapiens
uccauagaucuggaucugg

SEQ ID NO: 875 - RNA, 19 nt, Homo sapiens
cagggaccaucaaaguggg

SEQ ID NO: 876 - RNA, 19 nt, Homo sapiens
ccagggaccaucaaagugg

SEQ ID NO: 877 - RNA, 19 nt, Homo sapiens
agaaagaggaagagugggu

SEQ ID NO: 878 - RNA, 19 nt, Homo sapiens
gcuggaaacacugaagagu

SEQ ID NO: 879 - RNA, 19 nt, Homo sapiens
auggaagcuacuuugacua

SEQ ID NO: 880 - RNA, 19 nt, Homo sapiens
auuuuccauagaucuggau

SEQ ID NO: 881 - RNA, 19 nt, Homo sapiens
auagcagacuuguuccgac

SEQ ID NO: 882 - RNA, 19 nt, Homo sapiens
cucgccugguccugauuuc

SEQ ID NO: 883 - RNA, 19 nt, Homo sapiens
acugaagaguuaucgccag

SEQ ID NO: 884 - RNA, 19 nt, Homo sapiens
gaaaaccuuuaaaggggga

SEQ ID NO: 885 - RNA, 19 nt, Homo sapiens
caggaugcgaugucuaugc

SEQ ID NO: 886 - RNA, 19 nt, Homo sapiens
aaagugauucagugauuuc

SEQ ID NO: 887 - RNA, 19 nt, Homo sapiens
acugugaauaaauggaagc

SEQ ID NO: 888 - RNA, 19 nt, Homo sapiens
cuugugaucaaccaggagg

SEQ ID NO: 889 - RNA, 19 nt, Homo sapiens
acuugaagcaugguguuuc

SEQ ID NO: 890 - RNA, 19 nt, Homo sapiens
acuucaggcccaauauugu

SEQ ID NO: 891 - RNA, 19 nt, Homo sapiens
guggauaaccagcuuccug

SEQ ID NO: 892 - RNA, 19 nt, Homo sapiens
gaggugaccuucaggaagc

SEQ ID NO: 893 - RNA, 19 nt, Homo sapiens
aauguuuuuaaaacuguga

SEQ ID NO: 894 - RNA, 19 nt, Homo sapiens
uaauuucaggaugcgaugu

SEQ ID NO: 895 - RNA, 19 nt, Homo sapiens
uaaauuugugauuuucaca

SEQ ID NO: 896 - RNA, 19 nt, Homo sapiens
guuuaacugauuauggaau

SEQ ID NO: 897 - RNA, 19 nt, Homo sapiens
gauccuuucugaggcgucg

SEQ ID NO: 898 - RNA, 19 nt, Homo sapiens
ucuuugggcaguauuuugu

SEQ ID NO: 899 - RNA, 19 nt, Homo sapiens
ugacccuucagaacgaaag

SEQ ID NO: 900 - RNA, 19 nt, Homo sapiens
uauugccauuuuguccuuu

SEQ ID NO: 901 - RNA, 19 nt, Homo sapiens
uugugcuggaaaacccagg

SEQ ID NO: 902 - RNA, 19 nt, Homo sapiens
uaacugauuauggaauagu

SEQ ID NO: 903 - RNA, 19 nt, Homo sapiens
gaauaguucuuucuccugc

SEQ ID NO: 904 - RNA, 19 nt, Homo sapiens
ggagggaaacaugguuacu

SEQ ID NO: 905 - RNA, 19 nt, Homo sapiens
cccgggcuagcuuuugaaa

SEQ ID NO: 906 - RNA, 19 nt, Homo sapiens
uggaauaguucuuucuccu

SEQ ID NO: 907 - RNA, 19 nt, Homo sapiens
auuggauuuccuaaaggug

SEQ ID NO: 908 - RNA, 19 nt, Homo sapiens
ugacuaaacuugaaaaaug

SEQ ID NO: 909 - RNA, 19 nt, Homo sapiens
cgcccaccacaaaugcagu

SEQ ID NO: 910 - RNA, 19 nt, Homo sapiens
ccugauuucccugaccugc

SEQ ID NO: 911 - RNA, 19 nt, Homo sapiens
ugaagcaugguguuucaga

SEQ ID NO: 912 - RNA, 19 nt, Homo sapiens
agcagacuuguuccgaccc

SEQ ID NO: 913 - skipped

SEQ ID NO: 914 - RNA, 19 nt, Homo sapiens
gauggcuuguuccagaugc

SEQ ID NO: 915 - RNA, 19 nt, Homo sapiens
cagaacgaaaguuauaugg

SEQ ID NO: 916 - RNA, 19 nt, Homo sapiens
uuauggaauaguucuuucu

SEQ ID NO: 917 - RNA, 19 nt, Homo sapiens
augguguuucagaacugag

SEQ ID NO: 918 - RNA, 19 nt, Homo sapiens
uccuggaauauuagaugcc

SEQ ID NO: 919 - RNA, 19 nt, Homo sapiens
aggaccagauugcuuacuc

SEQ ID NO: 920 - RNA, 19 nt, Homo sapiens
uggugacacccugacucuc

SEQ ID NO: 921 - skipped

SEQ ID NO: 922 - RNA, 19 nt, Homo sapiens
cuucaggcccaauauugua

SEQ ID NO: 923 - RNA, 19 nt, Homo sapiens
uggaagcuacuuugacuag

SEQ ID NO: 924 - RNA, 19 nt, Homo sapiens
uaaccagcuuccugaaguc

SEQ ID NO: 925 - RNA, 19 nt, Homo sapiens
aaaaauguucucaaaaaug

SEQ ID NO: 926 - RNA, 19 nt, Homo sapiens
uagcagacuuguuccgacc

SEQ ID NO: 927 - RNA, 19 nt, Homo sapiens
uuccccucagcuaaugacg

SEQ ID NO: 928 - RNA, 19 nt, Homo sapiens
ugggcaguauuuugugcug

SEQ ID NO: 929 - RNA, 19 nt, Homo sapiens
acccaaggaccagauugcu

SEQ ID NO: 930 - RNA, 19 nt, Homo sapiens
ggaagcuacuuugacuagu

SEQ ID NO: 931 - RNA, 19 nt, Homo sapiens
cccaauauuguaauuucag

SEQ ID NO: 932 - RNA, 19 nt, Homo sapiens
cuuugggcaguauuuugug

SEQ ID NO: 933 - RNA, 19 nt, Homo sapiens
uuguuuaaaacccaauauc

SEQ ID NO: 934 - RNA, 19 nt, Homo sapiens
ccugguccugauuucccug

SEQ ID NO: 935 - RNA, 19 nt, Homo sapiens
uuccagaugcauuuuaacc

SEQ ID NO: 936 - RNA, 19 nt, Homo sapiens
aaaugacaacacuugaagc

SEQ ID NO: 937 - RNA, 19 nt, Homo sapiens
ccaaauauggcuggaaugc

SEQ ID NO: 938 - RNA, 19 nt, Homo sapiens
cucaaugcuucaauguccc

SEQ ID NO: 939 - RNA, 19 nt, Homo sapiens
accagcuuccugaagucac

SEQ ID NO: 940 - skipped

SEQ ID NO: 941 - RNA, 19 nt, Homo sapiens
uuccauagaucuggaucug

SEQ ID NO: 942 - RNA, 19 nt, Homo sapiens
aacuucaggcccaauauug

SEQ ID NO: 943 - RNA, 19 nt, Homo sapiens
aagaguuaucgccagugug

SEQ ID NO: 944 - RNA, 19 nt, Homo sapiens
ucaggaugcgaugucuaug

SEQ ID NO: 945 - RNA, 19 nt, Homo sapiens
uccagaugcauuuuaacca

SEQ ID NO: 946 - RNA, 19 nt, Homo sapiens
acugaggugaccuucagga

SEQ ID NO: 947 - skipped

SEQ ID NO: 948 - RNA, 19 nt, Homo sapiens
cugguccugauuucccuga

SEQ ID NO: 949 - RNA, 19 nt, Homo sapiens
acacugaagaguuaucgcc

SEQ ID NO: 950 - RNA, 19 nt, Homo sapiens
aaaucaccacucuuugggc

SEQ ID NO: 951 - RNA, 19 nt, Homo sapiens
acccagggaccaucaaagu

SEQ ID NO: 952 - RNA, 19 nt, Homo sapiens
cccagggaccaucaaagug

SEQ ID NO: 953 - RNA, 19 nt, Homo sapiens
ugacaacacuugaagcaug

SEQ ID NO: 954 - RNA, 19 nt, Homo sapiens
uucuuauuggugacgugga

SEQ ID NO: 955 - RNA, 19 nt, Homo sapiens
cacuucgagccucacaugc

SEQ ID NO: 956 - RNA, 19 nt, Homo sapiens
cuucuuauuggugacgugg

SEQ ID NO: 957 - RNA, 19 nt, Homo sapiens
auggaauaguucuuucucc

SEQ ID NO: 958 - RNA, 19 nt, Homo sapiens
aaaaucaccacucuuuggg

SEQ ID NO: 959 - skipped

SEQ ID NO: 960 - RNA, 19 nt, Homo sapiens
uguccuggaauauuagaug

SEQ ID NO: 961 - RNA, 19 nt, Homo sapiens
aggagggaaacaugguuac

SEQ ID NO: 962 - RNA, 19 nt, Homo sapiens
aagcaaccaacuucaggcc

SEQ ID NO: 963 - RNA, 19 nt, Homo sapiens
augucaguuguuuaaaacc

SEQ ID NO: 964 - RNA, 19 nt, Homo sapiens
uaugucaguuguuuaaaac

SEQ ID NO: 965 - RNA, 19 nt, Homo sapiens
aauuucaggaugcgauguc

SEQ ID NO: 966 - RNA, 19 nt, Homo sapiens
uucaggcccaauauuguaa

SEQ ID NO: 967 - RNA, 19 nt, Homo sapiens
ucagacagcauuggauuuc

SEQ ID NO: 968 - RNA, 19 nt, Homo sapiens
aagcuacuuugacuaguuu

SEQ ID NO: 969 - RNA, 19 nt, Homo sapiens
gggaccaucaaagugggag

SEQ ID NO: 970 - RNA, 19 nt, Homo sapiens
ugacacccugacucucagu

SEQ ID NO: 971 - RNA, 19 nt, Homo sapiens
caauauuguaauuucagga

SEQ ID NO: 972 - RNA, 19 nt, Homo sapiens
aaagcaaccaacuucaggc

SEQ ID NO: 973 - RNA, 19 nt, Homo sapiens
ugcuuacucagacaccagc

SEQ ID NO: 974 - RNA, 19 nt, Homo sapiens
aggcccaauauuguaauuu

SEQ ID NO: 975 - skipped

SEQ ID NO: 976 - RNA, 19 nt, Homo sapiens
ugggccaguaaugggaacc

SEQ ID NO: 977 - RNA, 19 nt, Homo sapiens
agcaaccaacuucaggccc

SEQ ID NO: 978-979 - skipped (2 entries)

SEQ ID NO: 980 - RNA, 19 nt, Homo sapiens
agggaccaucaaaguggga

SEQ ID NO: 981 - RNA, 19 nt, Homo sapiens
gacacccugacucucagug

SEQ ID NO: 982 - RNA, 19 nt, Homo sapiens
acgcccaccacaaaugcag

SEQ ID NO: 983 - RNA, 19 nt, Homo sapiens
uuuuuuauugccauuuugu

SEQ ID NO: 984 - RNA, 19 nt, Homo sapiens
uuuccuaaaggugcucagg

SEQ ID NO: 985 - RNA, 19 nt, Homo sapiens
uuaaaacugugaauaaaug

SEQ ID NO: 986 - skipped

SEQ ID NO: 987 - RNA, 19 nt, Homo sapiens
aucaccacucuuugggcag

SEQ ID NO: 988 - RNA, 19 nt, Homo sapiens
uggauccuugccauucccc

SEQ ID NO: 989 - RNA, 19 nt, Homo sapiens
ugaggugaccuucaggaag

SEQ ID NO: 990 - RNA, 19 nt, Homo sapiens
agcuucuuauuggugacgu

SEQ ID NO: 991 - RNA, 19 nt, Homo sapiens
acacccugacucucagugc

SEQ ID NO: 992 - skipped

SEQ ID NO: 993 - RNA, 19 nt, Homo sapiens
auuuugugcuggaaaaccc

SEQ ID NO: 994 - RNA, 19 nt, Homo sapiens
gaaguauauuuuuuauugc

SEQ ID NO: 995 - RNA, 19 nt, Homo sapiens
uacugaaaaccuuuaaagg

SEQ ID NO: 996 - RNA, 19 nt, Homo sapiens
aauagcagacuuguuccga

SEQ ID NO: 997 - RNA, 19 nt, Homo sapiens
auuuuuuauugccauuuug

SEQ ID NO: 998 - RNA, 19 nt, Homo sapiens
uugggcaguauuuugugcu

SEQ ID NO: 999 - RNA, 19 nt, Homo sapiens
ucucaaugcuucaaugucc

SEQ ID NO: 1000 - RNA, 19 nt, Homo sapiens
uuaaauuugugauuuucac

SEQ ID NO: 1001 - RNA, 19 nt, Homo sapiens
ucagaacgaaaguuauaug

SEQ ID NO: 1002 - RNA, 19 nt, Homo sapiens
uuuauugccauuuuguccu

SEQ ID NO: 1003 - RNA, 19 nt, Homo sapiens
uuugggcaguauuuugugc

SEQ ID NO: 1004 - RNA, 19 nt, Homo sapiens
aaauguuuuuaaaacugug

SEQ ID NO: 1005 - RNA, 19 nt, Homo sapiens
acugaaaaccuuuaaaggg

SEQ ID NO: 1006 - RNA, 19 nt, Homo sapiens
uugugaucaaccaggaggg

SEQ ID NO: 1007 - RNA, 19 nt, Homo sapiens
cauuuucuuuaaauuugug

SEQ ID NO: 1008 - skipped

SEQ ID NO: 1009 - RNA, 19 nt, Homo sapiens
aaacgcccaccacaaaugc

SEQ ID NO: 1010 - RNA, 19 nt, Homo sapiens
aaauagcagacuuguuccg

SEQ ID NO: 1011 - RNA, 19 nt, Homo sapiens
gagcuucuuauuggugacg

SEQ ID NO: 1012 - RNA, 19 nt, Homo sapiens
cagauauuaauuuuccaua

SEQ ID NO: 1013 - RNA, 19 nt, Homo sapiens
uauuguaauuucaggaugc

SEQ ID NO: 1014 - RNA, 19 nt, Homo sapiens
ugugauuuucacauuuuuc

SEQ ID NO: 1015 - RNA, 19 nt, Homo sapiens
ugacguggaacugaaaagg

SEQ ID NO: 1016 - RNA, 19 nt, Homo sapiens
gaaagaggaagagugggug

SEQ ID NO: 1017 - skipped

SEQ ID NO: 1018 - RNA, 19 nt, Homo sapiens
ugauccuuucugaggcguc

SEQ ID NO: 1019 - RNA, 19 nt, Homo sapiens
augucuaugcagaggauuc

SEQ ID NO: 1020 - RNA, 19 nt, Homo sapiens
ucaggcccaauauuguaau

SEQ ID NO: 1021 - RNA, 19 nt, Homo sapiens
cuuuaaauuugugauuuuc

SEQ ID NO: 1022 - skipped

SEQ ID NO: 1023 - RNA, 19 nt, Homo sapiens
uucgagccucacaugcgac

SEQ ID NO: 1024 - RNA, 19 nt, Homo sapiens
uuuuccauagaucuggauc

SEQ ID NO: 1025 - RNA, 19 nt, Homo sapiens
uauggaauaguucuuucuc

SEQ ID NO: 1026 - RNA, 19 nt, Homo sapiens
gacguggaacugaaaaggg

SEQ ID NO: 1027 - RNA, 19 nt, Homo sapiens
auuaauuuuccauagaucu

SEQ ID NO: 1028 - RNA, 19 nt, Homo sapiens
ugcagccuacacaaaggac

SEQ ID NO: 1029 - RNA, 19 nt, Homo sapiens
aaccaggagggaaacaugg

SEQ ID NO: 1030 - RNA, 19 nt, Homo sapiens
uaauuuuccauagaucugg

SEQ ID NO: 1031 - RNA, 19 nt, Homo sapiens
ugucaguuguuuaaaaccc

SEQ ID NO: 1032 - RNA, 19 nt, Homo sapiens
uugaagcaugguguuucag

SEQ ID NO: 1033 - RNA, 19 nt, Homo sapiens
ucgccugguccugauuucc

SEQ ID NO: 1034 - RNA, 19 nt, Homo sapiens
uaaaacugugaauaaaugg

SEQ ID NO: 1035 - RNA, 19 nt, Homo sapiens
uuggauuuccuaaaggugc

SEQ ID NO: 1036 - RNA, 19 nt, Homo sapiens
aaguauauuuuuuauugcc

SEQ ID NO: 1037 - RNA, 19 nt, Homo sapiens
uauuaauuuuccauagauc

SEQ ID NO: 1038 - RNA, 19 nt, Homo sapiens
auauuguaauuucaggaug

SEQ ID NO: 1039 - RNA, 19 nt, Homo sapiens
auccuuucugaggcgucgc

SEQ ID NO: 1040 - RNA, 19 nt, Homo sapiens
uuuuuauugccauuuuguc

SEQ ID NO: 1041 - RNA, 19 nt, Homo sapiens
uagagaagaaaguuaaagc

SEQ ID NO: 1042 - skipped

SEQ ID NO: 1043 - RNA, 19 nt, Homo sapiens
gcccaccacaaaugcagug

SEQ ID NO: 1044 - RNA, 19 nt, Homo sapiens
uaaagcaaccaacuucagg

SEQ ID NO: 1045 - RNA, 19 nt, Homo sapiens
uuaaagcaaccaacuucag

SEQ ID NO: 1046 - RNA, 19 nt, Homo sapiens
uuguuccgacccaaggacc

SEQ ID NO: 1047 - RNA, 19 nt, Homo sapiens
uuaauuuuccauagaucug

SEQ ID NO: 1048 - RNA, 19 nt, Homo sapiens
aacacugaagaguuaucgc

SEQ ID NO: 1049-1051 - skipped (3 entries)

SEQ ID NO: 1052 - RNA, 19 nt, Homo sapiens
aaacacugaagaguuaucg

SEQ ID NO: 1053 - RNA, 19 nt, Homo sapiens
auuauggaauaguucuuuc

SEQ ID NO: 1054-1056 - skipped (3 entries)

SEQ ID NO: 1057 - RNA, 19 nt, Homo sapiens
auuuuaaccacaguggacc

SEQ ID NO: 1058 - RNA, 19 nt, Homo sapiens
uuuuauugccauuuugucc

SEQ ID NO: 1059 - RNA, 19 nt, Artificial Sequence
  source: /note="Description of Artificial Sequence: Synthetic oligonucleotide"
ccuucagaacgaaaguuau

SEQ ID NO: 1060 - RNA, 19 nt, Artificial Sequence
  source: /note="Description of Artificial Sequence: Synthetic oligonucleotide"
gaacgaaaguuauauggaa

SEQ ID NO: 1061 - RNA, 19 nt, Artificial Sequence
  source: /note="Description of Artificial Sequence: Synthetic oligonucleotide"
guuuaaaacccaauaucua

SEQ ID NO: 1062 - RNA, 19 nt, Artificial Sequence
  source: /note="Description of Artificial Sequence: Synthetic oligonucleotide"
uauguccuggaauauuaga

SEQ ID NO: 1063 - RNA, 19 nt, Artificial Sequence
  source: /note="Description of Artificial Sequence: Synthetic oligonucleotide"
guauguccuggaauauuag

SEQ ID NO: 1064 - RNA, 19 nt, Artificial Sequence
  source: /note="Description of Artificial Sequence: Synthetic oligonucleotide"
acccuucagaacgaaaguu

SEQ ID NO: 1065 - RNA, 19 nt, Artificial Sequence
  source: /note="Description of Artificial Sequence: Synthetic oligonucleotide"
gcccaauauuguaauuuca

SEQ ID NO: 1066 - RNA, 19 nt, Artificial Sequence
  source: /note="Description of Artificial Sequence: Synthetic oligonucleotide"
ggaccaucaaagugggaga

SEQ ID NO: 1067 - RNA, 19 nt, Artificial Sequence
  source: /note="Description of Artificial Sequence: Synthetic oligonucleotide"
aaucaccacucuuugggca

SEQ ID NO: 1068 - RNA, 19 nt, Artificial Sequence
  source: /note="Description of Artificial Sequence: Synthetic oligonucleotide"
cucuuugggcaguauuuug

SEQ ID NO: 1069 - RNA, 19 nt, Artificial Sequence
  source: /note="Description of Artificial Sequence: Synthetic oligonucleotide"
gaugcgaugucuaugcaga

SEQ ID NO: 1070 - RNA, 19 nt, Artificial Sequence
  source: /note="Description of Artificial Sequence: Synthetic oligonucleotide"
ggaaaaucaccacucuuug

SEQ ID NO: 1071 - RNA, 19 nt, Artificial Sequence
  source: /note="Description of Artificial Sequence: Synthetic oligonucleotide"
aauguucucaaaaaugaca

SEQ ID NO: 1072 - RNA, 19 nt, Artificial Sequence
  source: /note="Description of Artificial Sequence: Synthetic oligonucleotide"
guuuuggcuugugaucaac

SEQ ID NO: 1073 - RNA, 19 nt, Artificial Sequence
  source: /note="Description of Artificial Sequence: Synthetic oligonucleotide"
agaagaaaagugauucagu

SEQ ID NO: 1074 - RNA, 19 nt, Artificial Sequence
  source: /note="Description of Artificial Sequence: Synthetic oligonucleotide"
ucugaugaaguauauuuuu

SEQ ID NO: 1075 - RNA, 19 nt, Artificial Sequence
  source: /note="Description of Artificial Sequence: Synthetic oligonucleotide"
ggcccaauauuguaauuuc

SEQ ID NO: 1076 - RNA, 19 nt, Artificial Sequence
  source: /note="Description of Artificial Sequence: Synthetic oligonucleotide"
ggaugcgaugucuaugcag

SEQ ID NO: 1077 - RNA, 19 nt, Artificial Sequence
  source: /note="Description of Artificial Sequence: Synthetic oligonucleotide"
aaaauguucucaaaaauga

SEQ ID NO: 1078 - RNA, 19 nt, Artificial Sequence
  source: /note="Description of Artificial Sequence: Synthetic oligonucleotide"
uguaauuucaggaugcgau

SEQ ID NO: 1079 - RNA, 19 nt, Artificial Sequence
  source: /note="Description of Artificial Sequence: Synthetic oligonucleotide"
aacugauuauggaauaguu

SEQ ID NO: 1080 - RNA, 19 nt, Artificial Sequence
  source: /note="Description of Artificial Sequence: Synthetic oligonucleotide"
cacuugaagcaugguguuu

SEQ ID NO: 1081 - RNA, 19 nt, Artificial Sequence
  source: /note="Description of Artificial Sequence: Synthetic oligonucleotide"
acacuugaagcaugguguu

SEQ ID NO: 1082 - RNA, 19 nt, Artificial Sequence
  source: /note="Description of Artificial Sequence: Synthetic oligonucleotide"
cauuccccucagcuaauga

SEQ ID NO: 1083 - RNA, 19 nt, Artificial Sequence
  source: /note="Description of Artificial Sequence: Synthetic oligonucleotide"
gaaacacugaagaguuauc

SEQ ID NO: 1084 - RNA, 19 nt, Artificial Sequence
  source: /note="Description of Artificial Sequence: Synthetic oligonucleotide"
ggaccagauugcuuacuca

SEQ ID NO: 1085 - RNA, 19 nt, Artificial Sequence
  source: /note="Description of Artificial Sequence: Synthetic oligonucleotide"
gccauuuuguccuuugauu

SEQ ID NO: 1086 - RNA, 19 nt, Artificial Sequence
  source: /note="Description of Artificial Sequence: Synthetic oligonucleotide"
acucuuugggcaguauuuu

SEQ ID NO: 1087 - RNA, 19 nt, Artificial Sequence
  source: /note="Description of Artificial Sequence: Synthetic oligonucleotide"
cuaaaggugcucaggagga

SEQ ID NO: 1088 - RNA, 19 nt, Artificial Sequence
  source: /note="Description of Artificial Sequence: Synthetic oligonucleotide"
gccagugugacccuucaga

SEQ ID NO: 1089 - RNA, 19 nt, Artificial Sequence
  source: /note="Description of Artificial Sequence: Synthetic oligonucleotide"
gagaagaaaagugauucag

SEQ ID NO: 1090 - RNA, 19 nt, Artificial Sequence
  source: /note="Description of Artificial Sequence: Synthetic oligonucleotide"
caaccaggagggaaacaug

SEQ ID NO: 1091 - RNA, 19 nt, Artificial Sequence
  source: /note="Description of Artificial Sequence: Synthetic oligonucleotide"
agagaagaaaguuaaagca

SEQ ID NO: 1092 - RNA, 19 nt, Artificial Sequence
  source: /note="Description of Artificial Sequence: Synthetic oligonucleotide"
agugggagacccuguguac

SEQ ID NO: 1093 - RNA, 19 nt, Artificial Sequence
  source: /note="Description of Artificial Sequence: Synthetic oligonucleotide"
gcauuggauuuccuaaagg

SEQ ID NO: 1094 - RNA, 19 nt, Artificial Sequence
  source: /note="Description of Artificial Sequence: Synthetic oligonucleotide"
ggcuuguuccagaugcauu

SEQ ID NO: 1095 - RNA, 19 nt, Artificial Sequence
  source: /note="Description of Artificial Sequence: Synthetic oligonucleotide"
ggauuuccuaaaggugcuc

SEQ ID NO: 1096 - RNA, 19 nt, Artificial Sequence
  source: /note="Description of Artificial Sequence: Synthetic oligonucleotide"
gugacccuucagaacgaaa

SEQ ID NO: 1097 - RNA, 19 nt, Artificial Sequence
  source: /note="Description of Artificial Sequence: Synthetic oligonucleotide"
cagacagcauuggauuucc

SEQ ID NO: 1098 - RNA, 19 nt, Artificial Sequence
  source: /note="Description of Artificial Sequence: Synthetic oligonucleotide"
gcauuuuaaccacagugga

SEQ ID NO: 1099 - RNA, 19 nt, Artificial Sequence
  source: /note="Description of Artificial Sequence: Synthetic oligonucleotide"
gaggagaagaaaagugauu

SEQ ID NO: 1100 - RNA, 19 nt, Artificial Sequence
  source: /note="Description of Artificial Sequence: Synthetic oligonucleotide"
aaguuauauggaaaaucac

SEQ ID NO: 1101 - RNA, 19 nt, Artificial Sequence
  source: /note="Description of Artificial Sequence: Synthetic oligonucleotide"
aguuauauggaaaaucacc

SEQ ID NO: 1102 - RNA, 19 nt, Artificial Sequence
  source: /note="Description of Artificial Sequence: Synthetic oligonucleotide"
uguuuaaaacccaauaucu

SEQ ID NO: 1103 - RNA, 19 nt, Artificial Sequence
  source: /note="Description of Artificial Sequence: Synthetic oligonucleotide"
ucuuauuggugacguggaa

SEQ ID NO: 1104 - RNA, 19 nt, Artificial Sequence
  source: /note="Description of Artificial Sequence: Synthetic oligonucleotide"
gacccuucagaacgaaagu

SEQ ID NO: 1105 - RNA, 19 nt, Artificial Sequence
  source: /note="Description of Artificial Sequence: Synthetic oligonucleotide"
cucuaagaucugaugaagu

SEQ ID NO: 1106 - RNA, 19 nt, Artificial Sequence
  source: /note="Description of Artificial Sequence: Synthetic oligonucleotide"
uaagaucugaugaaguaua

SEQ ID NO: 1107 - RNA, 19 nt, Artificial Sequence
  source: /note="Description of Artificial Sequence: Synthetic oligonucleotide"
ucaccacucuuugggcagu

SEQ ID NO: 1108 - RNA, 19 nt, Artificial Sequence
  source: /note="Description of Artificial Sequence: Synthetic oligonucleotide"
ccaaggaccagauugcuua

SEQ ID NO: 1109 - RNA, 19 nt, Artificial Sequence
  source: /note="Description of Artificial Sequence: Synthetic oligonucleotide"
guuccagaugcauuuuaac

SEQ ID NO: 1110 - RNA, 19 nt, Artificial Sequence
  source: /note="Description of Artificial Sequence: Synthetic oligonucleotide"
gacuaaacuugaaaaaugu

SEQ ID NO: 1111 - RNA, 19 nt, Artificial Sequence
  source: /note="Description of Artificial Sequence: Synthetic oligonucleotide"
aggaugcgaugucuaugca

SEQ ID NO: 1112 - RNA, 19 nt, Artificial Sequence
  source: /note="Description of Artificial Sequence: Synthetic oligonucleotide"
cauuggauuuccuaaaggu

SEQ ID NO: 1113 - RNA, 19 nt, Artificial Sequence
  source: /note="Description of Artificial Sequence: Synthetic oligonucleotide"
gaucugaugaaguauauuu

SEQ ID NO: 1114 - RNA, 19 nt, Artificial Sequence
  source: /note="Description of Artificial Sequence: Synthetic oligonucleotide"
aaauggaagcuacuuugac

SEQ ID NO: 1115 - RNA, 19 nt, Artificial Sequence
  source: /note="Description of Artificial Sequence: Synthetic oligonucleotide"
acucuaagaucugaugaag

SEQ ID NO: 1116 - RNA, 19 nt, Artificial Sequence
  source: /note="Description of Artificial Sequence: Synthetic oligonucleotide"
gaccagauugcuuacucag

SEQ ID NO: 1117 - RNA, 19 nt, Artificial Sequence
  source: /note="Description of Artificial Sequence: Synthetic oligonucleotide"
gaccaucaaagugggagac

SEQ ID NO: 1118 - RNA, 19 nt, Artificial Sequence
  source: /note="Description of Artificial Sequence: Synthetic oligonucleotide"
gggaaguugacuaaacuug

SEQ ID NO: 1119 - RNA, 19 nt, Artificial Sequence
  source: /note="Description of Artificial Sequence: Synthetic oligonucleotide"
cugauuauggaauaguucu

SEQ ID NO: 1120 - RNA, 19 nt, Artificial Sequence
  source: /note="Description of Artificial Sequence: Synthetic oligonucleotide"
aggagaagaaaagugauuc

SEQ ID NO: 1121 - RNA, 19 nt, Artificial Sequence
  source: /note="Description of Artificial Sequence: Synthetic oligonucleotide"
ccauuuuguccuuugauua

SEQ ID NO: 1122 - RNA, 19 nt, Artificial Sequence
  source: /note="Description of Artificial Sequence: Synthetic oligonucleotide"
aaauguucucaaaaaugac

SEQ ID NO: 1123 - RNA, 19 nt, Artificial Sequence
  source: /note="Description of Artificial Sequence: Synthetic oligonucleotide"
uguuccagaugcauuuuaa

SEQ ID NO: 1124 - RNA, 19 nt, Artificial Sequence
  source: /note="Description of Artificial Sequence: Synthetic oligonucleotide"
cugggccaguaaugggaac

SEQ ID NO: 1125 - RNA, 19 nt, Artificial Sequence
  source: /note="Description of Artificial Sequence: Synthetic oligonucleotide"
accagauugcuuacucaga

SEQ ID NO: 1126 - RNA, 19 nt, Artificial Sequence
  source: /note="Description of Artificial Sequence: Synthetic oligonucleotide"
cgggcuagcuuuugaaaug

SEQ ID NO: 1127 - RNA, 19 nt, Artificial Sequence
  source: /note="Description of Artificial Sequence: Synthetic oligonucleotide"
gcgaugucuaugcagaggu

SEQ ID NO: 1128 - RNA, 19 nt, Artificial Sequence
  source: /note="Description of Artificial Sequence: Synthetic oligonucleotide"
ccccgggcuagcuuuugaa

SEQ ID NO: 1129 - RNA, 19 nt, Artificial Sequence
  source: /note="Description of Artificial Sequence: Synthetic oligonucleotide"
gaaaaucaccacucuuugg

SEQ ID NO: 1130 - RNA, 19 nt, Artificial Sequence
  source: /note="Description of Artificial Sequence: Synthetic oligonucleotide"
cacugaagaguuaucgcca

SEQ ID NO: 1131 - RNA, 19 nt, Artificial Sequence
  source: /note="Description of Artificial Sequence: Synthetic oligonucleotide"
aucugaugaaguauauuuu

SEQ ID NO: 1132 - RNA, 19 nt, Artificial Sequence
  source: /note="Description of Artificial Sequence: Synthetic oligonucleotide"
uucaggaugcgaugucuau

SEQ ID NO: 1133 - RNA, 19 nt, Artificial Sequence
  source: /note="Description of Artificial Sequence: Synthetic oligonucleotide"
gccugguccugauuucccu

SEQ ID NO: 1134 - RNA, 19 nt, Artificial Sequence
  source: /note="Description of Artificial Sequence: Synthetic oligonucleotide"
aacacuugaagcauggugu

SEQ ID NO: 1135 - RNA, 19 nt, Artificial Sequence
  source: /note="Description of Artificial Sequence: Synthetic oligonucleotide"
ugggaaguugacuaaacuu

SEQ ID NO: 1136 - RNA, 19 nt, Artificial Sequence
  source: /note="Description of Artificial Sequence: Synthetic oligonucleotide"
guaauuucaggaugcgaug

SEQ ID NO: 1137 - RNA, 19 nt, Artificial Sequence
  source: /note="Description of Artificial Sequence: Synthetic oligonucleotide"
ggaaguugacuaaacuuga

SEQ ID NO: 1138 - RNA, 19 nt, Artificial Sequence
  source: /note="Description of Artificial Sequence: Synthetic oligonucleotide"
caacacuugaagcauggug

SEQ ID NO: 1139 - RNA, 19 nt, Artificial Sequence
  source: /note="Description of Artificial Sequence: Synthetic oligonucleotide"
cuaaacuugaaaaauguuu

SEQ ID NO: 1140 - RNA, 19 nt, Artificial Sequence
  source: /note="Description of Artificial Sequence: Synthetic oligonucleotide"
cuucgagccucacaugcga

SEQ ID NO: 1141 - RNA, 19 nt, Artificial Sequence
  source: /note="Description of Artificial Sequence: Synthetic oligonucleotide"
cuggaaacacugaagaguu

SEQ ID NO: 1142 - RNA, 19 nt, Artificial Sequence
  source: /note="Description of Artificial Sequence: Synthetic oligonucleotide"
gaagaaaagugauucagug

SEQ ID NO: 1143 - RNA, 19 nt, Artificial Sequence
  source: /note="Description of Artificial Sequence: Synthetic oligonucleotide"
gucucaaugcuucaauguc

SEQ ID NO: 1144 - RNA, 19 nt, Artificial Sequence
  source: /note="Description of Artificial Sequence: Synthetic oligonucleotide"
cuucucagacagcauugga

SEQ ID NO: 1145 - RNA, 19 nt, Artificial Sequence
  source: /note="Description of Artificial Sequence: Synthetic oligonucleotide"
gauccuugccauuccccuc

SEQ ID NO: 1146 - RNA, 19 nt, Artificial Sequence
  source: /note="Description of Artificial Sequence: Synthetic oligonucleotide"
uuuaaaacccaauaucuau

SEQ ID NO: 1147 - RNA, 19 nt, Artificial Sequence
  source: /note="Description of Artificial Sequence: Synthetic oligonucleotide"
ugguguuucagaacugaga

SEQ ID NO: 1148 - RNA, 19 nt, Artificial Sequence
  source: /note="Description of Artificial Sequence: Synthetic oligonucleotide"
agugauucagugauuucag

SEQ ID NO: 1149 - RNA, 19 nt, Artificial Sequence
  source: /note="Description of Artificial Sequence: Synthetic oligonucleotide"
agacagcauuggauuuccu

SEQ ID NO: 1150 - RNA, 19 nt, Artificial Sequence
  source: /note="Description of Artificial Sequence: Synthetic oligonucleotide"
cauuuuaaccacaguggac

SEQ ID NO: 1151 - RNA, 19 nt, Artificial Sequence
  source: /note="Description of Artificial Sequence: Synthetic oligonucleotide"
uucagaacgaaaguuauau

SEQ ID NO: 1152 - RNA, 19 nt, Artificial Sequence
  source: /note="Description of Artificial Sequence: Synthetic oligonucleotide"
ggaauaguucuuucuccug

SEQ ID NO: 1153 - RNA, 19 nt, Artificial Sequence
  source: /note="Description of Artificial Sequence: Synthetic oligonucleotide"
aguuaaagcaaccaacuuc

SEQ ID NO: 1154 - RNA, 19 nt, Artificial Sequence
  source: /note="Description of Artificial Sequence: Synthetic oligonucleotide"
auuccccucagcuaaugac

SEQ ID NO: 1155 - RNA, 19 nt, Artificial Sequence
  source: /note="Description of Artificial Sequence: Synthetic oligonucleotide"
cuagagaagaaaguuaaag

SEQ ID NO: 1156 - RNA, 19 nt, Artificial Sequence
  source: /note="Description of Artificial Sequence: Synthetic oligonucleotide"
cugaugaaguauauuuuuu

SEQ ID NO: 1157 - RNA, 19 nt, Artificial Sequence
  source: /note="Description of Artificial Sequence: Synthetic oligonucleotide"
uugugauuuucacauuuuu

SEQ ID NO: 1158 - RNA, 19 nt, Artificial Sequence
  source: /note="Description of Artificial Sequence: Synthetic oligonucleotide"
gaguuaucgccagugugac

SEQ ID NO: 1159 - RNA, 19 nt, Artificial Sequence
  source: /note="Description of Artificial Sequence: Synthetic oligonucleotide"
gacaacacuugaagcaugg

SEQ ID NO: 1160 - RNA, 19 nt, Artificial Sequence
  source: /note="Description of Artificial Sequence: Synthetic oligonucleotide"
cucagacagcauuggauuu

SEQ ID NO: 1161 - RNA, 19 nt, Artificial Sequence
  source: /note="Description of Artificial Sequence: Synthetic oligonucleotide"
cuuuaaagggggaaaagga

SEQ ID NO: 1162 - RNA, 19 nt, Artificial Sequence
  source: /note="Description of Artificial Sequence: Synthetic oligonucleotide"
ccauagaucuggaucuggc

SEQ ID NO: 1163 - RNA, 19 nt, Artificial Sequence
  source: /note="Description of Artificial Sequence: Synthetic oligonucleotide"
ugacaagacaggauucuga

SEQ ID NO: 1164 - RNA, 19 nt, Artificial Sequence
  source: /note="Description of Artificial Sequence: Synthetic oligonucleotide"
gugucucaaugcuucaaug

SEQ ID NO: 1165 - RNA, 19 nt, Artificial Sequence
  source: /note="Description of Artificial Sequence: Synthetic oligonucleotide"
ugauuauggaauaguucuu

SEQ ID NO: 1166 - RNA, 19 nt, Artificial Sequence
  source: /note="Description of Artificial Sequence: Synthetic oligonucleotide"
auguccuggaauauuagau

SEQ ID NO: 1167 - RNA, 19 nt, Artificial Sequence
  source: /note="Description of Artificial Sequence: Synthetic oligonucleotide"
ccagaugcauuuuaaccac

SEQ ID NO: 1168 - RNA, 19 nt, Artificial Sequence
  source: /note="Description of Artificial Sequence: Synthetic oligonucleotide"
uggaggagaagaaaaguga

SEQ ID NO: 1169 - RNA, 19 nt, Artificial Sequence
  source: /note="Description of Artificial Sequence: Synthetic oligonucleotide"
uggauuuccuaaaggugcu

SEQ ID NO: 1170 - RNA, 19 nt, Artificial Sequence
  source: /note="Description of Artificial Sequence: Synthetic oligonucleotide"
agaacgaaaguuauaugga

SEQ ID NO: 1171 - RNA, 19 nt, Artificial Sequence
  source: /note="Description of Artificial Sequence: Synthetic oligonucleotide"
gggcuagcuuuugaaaugg

SEQ ID NO: 1172 - RNA, 19 nt, Artificial Sequence
  source: /note="Description of Artificial Sequence: Synthetic oligonucleotide"
caggcccaauauuguaauu

SEQ ID NO: 1173 - RNA, 19 nt, Artificial Sequence
  source: /note="Description of Artificial Sequence: Synthetic oligonucleotide"
aguauauuuuuuauugcca

SEQ ID NO: 1174 - RNA, 19 nt, Artificial Sequence
  source: /note="Description of Artificial Sequence: Synthetic oligonucleotide"
guggaggagaagaaaagug

SEQ ID NO: 1175 - RNA, 19 nt, Artificial Sequence
  source: /note="Description of Artificial Sequence: Synthetic oligonucleotide"
gacaggauucugaaaacuc

SEQ ID NO: 1176 - RNA, 19 nt, Artificial Sequence
  source: /note="Description of Artificial Sequence: Synthetic oligonucleotide"
uaaauggaagcuacuuuga

SEQ ID NO: 1177 - RNA, 19 nt, Artificial Sequence
  source: /note="Description of Artificial Sequence: Synthetic oligonucleotide"
gcuucuuauuggugacgug

SEQ ID NO: 1178 - RNA, 19 nt, Artificial Sequence
  source: /note="Description of Artificial Sequence: Synthetic oligonucleotide"
acugauuauggaauaguuc

SEQ ID NO: 1179 - RNA, 19 nt, Artificial Sequence
  source: /note="Description of Artificial Sequence: Synthetic oligonucleotide"
ggcuagcuuuugaaauggc

SEQ ID NO: 1180 - RNA, 19 nt, Artificial Sequence
  source: /note="Description of Artificial Sequence: Synthetic oligonucleotide"
aaaacugugaauaaaugga

SEQ ID NO: 1181 - RNA, 19 nt, Artificial Sequence
  source: /note="Description of Artificial Sequence: Synthetic oligonucleotide"
gcuagcuuuugaaauggca

SEQ ID NO: 1182 - RNA, 19 nt, Artificial Sequence
  source: /note="Description of Artificial Sequence: Synthetic oligonucleotide"
agaaaagugauucagugau

SEQ ID NO: 1183 - RNA, 19 nt, Artificial Sequence
  source: /note="Description of Artificial Sequence: Synthetic oligonucleotide"
gacagcauuggauuuccua

SEQ ID NO: 1184 - RNA, 19 nt, Artificial Sequence
  source: /note="Description of Artificial Sequence: Synthetic oligonucleotide"
acuaaacuugaaaaauguu

SEQ ID NO: 1185 - RNA, 19 nt, Artificial Sequence
  source: /note="Description of Artificial Sequence: Synthetic oligonucleotide"
aaugcuucaaugucccagu

SEQ ID NO: 1186 - RNA, 19 nt, Artificial Sequence
  source: /note="Description of Artificial Sequence: Synthetic oligonucleotide"
gugcagccuacacaaagga

SEQ ID NO: 1187 - RNA, 19 nt, Artificial Sequence
  source: /note="Description of Artificial Sequence: Synthetic oligonucleotide"
ccgggcuagcuuuugaaau

SEQ ID NO: 1188 - RNA, 19 nt, Artificial Sequence
  source: /note="Description of Artificial Sequence: Synthetic oligonucleotide"
aauggaagcuacuuugacu

SEQ ID NO: 1189 - RNA, 19 nt, Artificial Sequence
  source: /note="Description of Artificial Sequence: Synthetic oligonucleotide"
ggauccuugccauuccccu

SEQ ID NO: 1190 - RNA, 19 nt, Artificial Sequence
  source: /note="Description of Artificial Sequence: Synthetic oligonucleotide"
aauuuuccauagaucugga

SEQ ID NO: 1191 - RNA, 19 nt, Artificial Sequence
  source: /note="Description of Artificial Sequence: Synthetic oligonucleotide"
uggauaaccagcuuccuga

SEQ ID NO: 1192 - RNA, 19 nt, Artificial Sequence
  source: /note="Description of Artificial Sequence: Synthetic oligonucleotide"
gggcaguauuuugugcugg

SEQ ID NO: 1193 - RNA, 19 nt, Artificial Sequence
  source: /note="Description of Artificial Sequence: Synthetic oligonucleotide"
aaacugugaauaaauggaa

SEQ ID NO: 1194 - RNA, 19 nt, Artificial Sequence
  source: /note="Description of Artificial Sequence: Synthetic oligonucleotide"
caggagggaaacaugguua

SEQ ID NO: 1195 - RNA, 19 nt, Artificial Sequence
  source: /note="Description of Artificial Sequence: Synthetic oligonucleotide"
guccuggaauauuagaugc

SEQ ID NO: 1196 - RNA, 19 nt, Artificial Sequence
  source: /note="Description of Artificial Sequence: Synthetic oligonucleotide"
ucucagacagcauuggauu

SEQ ID NO: 1197 - RNA, 19 nt, Artificial Sequence
  source: /note="Description of Artificial Sequence: Synthetic oligonucleotide"
gacugaggugaccuucagg

SEQ ID NO: 1198 - RNA, 19 nt, Artificial Sequence
  source: /note="Description of Artificial Sequence: Synthetic oligonucleotide"
gauuauggaauaguucuuu

SEQ ID NO: 1199 - RNA, 19 nt, Artificial Sequence
  source: /note="Description of Artificial Sequence: Synthetic oligonucleotide"
ggaggagaagaaaagugau

SEQ ID NO: 1200 - RNA, 19 nt, Artificial Sequence
  source: /note="Description of Artificial Sequence: Synthetic oligonucleotide"
ccuaaaggugcucaggagg

SEQ ID NO: 1201 - RNA, 19 nt, Artificial Sequence
  source: /note="Description of Artificial Sequence: Synthetic oligonucleotide"
auaacucuaagaucugaug

SEQ ID NO: 1202 - RNA, 19 nt, Artificial Sequence
  source: /note="Description of Artificial Sequence: Synthetic oligonucleotide"
auaaauggaagcuacuuug

SEQ ID NO: 1203 - RNA, 19 nt, Artificial Sequence
  source: /note="Description of Artificial Sequence: Synthetic oligonucleotide"
ugucucaaugcuucaaugu

SEQ ID NO: 1204 - RNA, 19 nt, Artificial Sequence
  source: /note="Description of Artificial Sequence: Synthetic oligonucleotide"
uggcuugugaucaaccagg

SEQ ID NO: 1205 - RNA, 19 nt, Artificial Sequence
  source: /note="Description of Artificial Sequence: Synthetic oligonucleotide"
acaggauucugaaaacucc

SEQ ID NO: 1206 - RNA, 19 nt, Artificial Sequence
  source: /note="Description of Artificial Sequence: Synthetic oligonucleotide"
uucucagacagcauuggau

SEQ ID NO: 1207 - RNA, 19 nt, Artificial Sequence
  source: /note="Description of Artificial Sequence: Synthetic oligonucleotide"
cauagaucuggaucuggcc

SEQ ID NO: 1208 - RNA, 19 nt, Artificial Sequence
  source: /note="Description of Artificial Sequence: Synthetic oligonucleotide"
agugugacccuucagaacg

SEQ ID NO: 1209 - RNA, 19 nt, Artificial Sequence
  source: /note="Description of Artificial Sequence: Synthetic oligonucleotide"
gugauuuucacauuuuucg

SEQ ID NO: 1210 - RNA, 19 nt, Artificial Sequence
  source: /note="Description of Artificial Sequence: Synthetic oligonucleotide"
cugaagaguuaucgccagu

SEQ ID NO: 1211 - RNA, 19 nt, Artificial Sequence
  source: /note="Description of Artificial Sequence: Synthetic oligonucleotide"
ccccuggauccuugccauu

SEQ ID NO: 1212 - RNA, 19 nt, Artificial Sequence
  source: /note="Description of Artificial Sequence: Synthetic oligonucleotide"
gacccaaggaccagauugc

SEQ ID NO: 1213 - RNA, 19 nt, Artificial Sequence
  source: /note="Description of Artificial Sequence: Synthetic oligonucleotide"
aacgcccaccacaaaugca

SEQ ID NO: 1214 - RNA, 19 nt, Artificial Sequence
  source: /note="Description of Artificial Sequence: Synthetic oligonucleotide"
uuguaauuucaggaugcga

SEQ ID NO: 1215 - RNA, 19 nt, Artificial Sequence
  source: /note="Description of Artificial Sequence: Synthetic oligonucleotide"
gugcuccuucuccaguucc

SEQ ID NO: 1216 - RNA, 19 nt, Artificial Sequence
  source: /note="Description of Artificial Sequence: Synthetic oligonucleotide"
cccaaggaccagauugcuu

SEQ ID NO: 1217 - RNA, 19 nt, Artificial Sequence
  source: /note="Description of Artificial Sequence: Synthetic oligonucleotide"
aaaaugacaacacuugaag

SEQ ID NO: 1218 - RNA, 19 nt, Artificial Sequence
  source: /note="Description of Artificial Sequence: Synthetic oligonucleotide"
gcuucucagacagcauugg

SEQ ID NO: 1219 - RNA, 19 nt, Artificial Sequence
  source: /note="Description of Artificial Sequence: Synthetic oligonucleotide"
agcuuccugaagucacagc

SEQ ID NO: 1220 - RNA, 19 nt, Artificial Sequence
  source: /note="Description of Artificial Sequence: Synthetic oligonucleotide"
aacugugaauaaauggaag

SEQ ID NO: 1221 - RNA, 19 nt, Artificial Sequence
  source: /note="Description of Artificial Sequence: Synthetic oligonucleotide"
aguuaucgccagugugacc

SEQ ID NO: 1222 - RNA, 19 nt, Artificial Sequence
  source: /note="Description of Artificial Sequence: Synthetic oligonucleotide"
ccaauauuguaauuucagg

SEQ ID NO: 1223 - RNA, 19 nt, Artificial Sequence
  source: /note="Description of Artificial Sequence: Synthetic oligonucleotide"
uuauugccauuuuguccuu

SEQ ID NO: 1224 - RNA, 19 nt, Artificial Sequence
  source: /note="Description of Artificial Sequence: Synthetic oligonucleotide"
caaauagcagacuuguucc

SEQ ID NO: 1225 - RNA, 19 nt, Artificial Sequence
  source: /note="Description of Artificial Sequence: Synthetic oligonucleotide"
uccuuucugaggcgucgcu

SEQ ID NO: 1226 - RNA, 19 nt, Artificial Sequence
  source: /note="Description of Artificial Sequence: Synthetic oligonucleotide"
uccauagaucuggaucugg

SEQ ID NO: 1227 - RNA, 19 nt, Artificial Sequence
  source: /note="Description of Artificial Sequence: Synthetic oligonucleotide"
cagggaccaucaaaguggg

SEQ ID NO: 1228 - RNA, 19 nt, Artificial Sequence
  source: /note="Description of Artificial Sequence: Synthetic oligonucleotide"
ccagggaccaucaaagugg

SEQ ID NO: 1229 - RNA, 19 nt, Artificial Sequence
  source: /note="Description of Artificial Sequence: Synthetic oligonucleotide"
agaaagaggaagagugggu

SEQ ID NO: 1230 - RNA, 19 nt, Artificial Sequence
  source: /note="Description of Artificial Sequence: Synthetic oligonucleotide"
gcuggaaacacugaagagu

SEQ ID NO: 1231 - RNA, 19 nt, Artificial Sequence
  source: /note="Description of Artificial Sequence: Synthetic oligonucleotide"
auggaagcuacuuugacua

SEQ ID NO: 1232 - RNA, 19 nt, Artificial Sequence
  source: /note="Description of Artificial Sequence: Synthetic oligonucleotide"
auuuuccauagaucuggau

SEQ ID NO: 1233 - RNA, 19 nt, Artificial Sequence
  source: /note="Description of Artificial Sequence: Synthetic oligonucleotide"
auagcagacuuguuccgac

SEQ ID NO: 1234 - RNA, 19 nt, Artificial Sequence
  source: /note="Description of Artificial Sequence: Synthetic oligonucleotide"
cucgccugguccugauuuc

SEQ ID NO: 1235 - RNA, 19 nt, Artificial Sequence
  source: /note="Description of Artificial Sequence: Synthetic oligonucleotide"
acugaagaguuaucgccag

SEQ ID NO: 1236 - RNA, 19 nt, Artificial Sequence
  source: /note="Description of Artificial Sequence: Synthetic oligonucleotide"
gaaaaccuuuaaaggggga

SEQ ID NO: 1237 - RNA, 19 nt, Artificial Sequence
  source: /note="Description of Artificial Sequence: Synthetic oligonucleotide"
caggaugcgaugucuaugc

SEQ ID NO: 1238 - RNA, 19 nt, Artificial Sequence
  source: /note="Description of Artificial Sequence: Synthetic oligonucleotide"
aaagugauucagugauuuc

SEQ ID NO: 1239 - RNA, 19 nt, Artificial Sequence
  source: /note="Description of Artificial Sequence: Synthetic oligonucleotide"
acugugaauaaauggaagc

SEQ ID NO: 1240 - RNA, 19 nt, Artificial Sequence
  source: /note="Description of Artificial Sequence: Synthetic oligonucleotide"
cuugugaucaaccaggagg

SEQ ID NO: 1241 - RNA, 19 nt, Artificial Sequence
  source: /note="Description of Artificial Sequence: Synthetic oligonucleotide"
acuugaagcaugguguuuc

SEQ ID NO: 1242 - RNA, 19 nt, Artificial Sequence
  source: /note="Description of Artificial Sequence: Synthetic oligonucleotide"
acuucaggcccaauauugu

SEQ ID NO: 1243 - RNA, 19 nt, Artificial Sequence
  source: /note="Description of Artificial Sequence: Synthetic oligonucleotide"
guggauaaccagcuuccug

SEQ ID NO: 1244 - RNA, 19 nt, Artificial Sequence
  source: /note="Description of Artificial Sequence: Synthetic oligonucleotide"
gaggugaccuucaggaagc

SEQ ID NO: 1245 - RNA, 19 nt, Artificial Sequence
  source: /note="Description of Artificial Sequence: Synthetic oligonucleotide"
aauguuuuuaaaacuguga

SEQ ID NO: 1246 - RNA, 19 nt, Artificial Sequence
  source: /note="Description of Artificial Sequence: Synthetic oligonucleotide"
uaauuucaggaugcgaugu

SEQ ID NO: 1247 - RNA, 19 nt, Artificial Sequence
  source: /note="Description of Artificial Sequence: Synthetic oligonucleotide"
uaaauuugugauuuucaca

SEQ ID NO: 1248 - RNA, 19 nt, Artificial Sequence
  source: /note="Description of Artificial Sequence: Synthetic oligonucleotide"
guuuaacugauuauggaau

SEQ ID NO: 1249 - RNA, 19 nt, Artificial Sequence
  source: /note="Description of Artificial Sequence: Synthetic oligonucleotide"
gauccuuucugaggcgucg

SEQ ID NO: 1250 - RNA, 19 nt, Artificial Sequence
  source: /note="Description of Artificial Sequence: Synthetic oligonucleotide"
ucuuugggcaguauuuugu

SEQ ID NO: 1251 - RNA, 19 nt, Artificial Sequence
  source: /note="Description of Artificial Sequence: Synthetic oligonucleotide"
ugacccuucagaacgaaag

SEQ ID NO: 1252 - RNA, 19 nt, Artificial Sequence
  source: /note="Description of Artificial Sequence: Synthetic oligonucleotide"
uauugccauuuuguccuuu

SEQ ID NO: 1253 - RNA, 19 nt, Artificial Sequence
  source: /note="Description of Artificial Sequence: Synthetic oligonucleotide"
uugugcuggaaaacccagg

SEQ ID NO: 1254 - RNA, 19 nt, Artificial Sequence
  source: /note="Description of Artificial Sequence: Synthetic oligonucleotide"
uaacugauuauggaauagu

SEQ ID NO: 1255 - RNA, 19 nt, Artificial Sequence
  source: /note="Description of Artificial Sequence: Synthetic oligonucleotide"
gaauaguucuuucuccugc

SEQ ID NO: 1256 - RNA, 19 nt, Artificial Sequence
  source: /note="Description of Artificial Sequence: Synthetic oligonucleotide"
ggagggaaacaugguuacu

SEQ ID NO: 1257 - RNA, 19 nt, Artificial Sequence
  source: /note="Description of Artificial Sequence: Synthetic oligonucleotide"
cccgggcuagcuuuugaaa

SEQ ID NO: 1258 - RNA, 19 nt, Artificial Sequence
  source: /note="Description of Artificial Sequence: Synthetic oligonucleotide"
uggaauaguucuuucuccu

SEQ ID NO: 1259 - RNA, 19 nt, Artificial Sequence
  source: /note="Description of Artificial Sequence: Synthetic oligonucleotide"
auuggauuuccuaaaggug

SEQ ID NO: 1260 - RNA, 19 nt, Artificial Sequence
  source: /note="Description of Artificial Sequence: Synthetic oligonucleotide"
ugacuaaacuugaaaaaug

SEQ ID NO: 1261 - RNA, 19 nt, Artificial Sequence
  source: /note="Description of Artificial Sequence: Synthetic oligonucleotide"
cgcccaccacaaaugcagu

SEQ ID NO: 1262 - RNA, 19 nt, Artificial Sequence
  source: /note="Description of Artificial Sequence: Synthetic oligonucleotide"
ccugauuucccugaccugc

SEQ ID NO: 1263 - RNA, 19 nt, Artificial Sequence
  source: /note="Description of Artificial Sequence: Synthetic oligonucleotide"
ugaagcaugguguuucaga

SEQ ID NO: 1264 - RNA, 19 nt, Artificial Sequence
  source: /note="Description of Artificial Sequence: Synthetic oligonucleotide"
agcagacuuguuccgaccc

SEQ ID NO: 1265 - RNA, 19 nt, Artificial Sequence
  source: /note="Description of Artificial Sequence: Synthetic oligonucleotide"
ggauuugacuucuuuuuua

SEQ ID NO: 1266 - RNA, 19 nt, Artificial Sequence
  source: /note="Description of Artificial Sequence: Synthetic oligonucleotide"
gauggcuuguuccagaugc

SEQ ID NO: 1267 - RNA, 19 nt, Artificial Sequence
  source: /note="Description of Artificial Sequence: Synthetic oligonucleotide"
cagaacgaaaguuauaugg

SEQ ID NO: 1268 - RNA, 19 nt, Artificial Sequence
  source: /note="Description of Artificial Sequence: Synthetic oligonucleotide"
uuauggaauaguucuuucu

SEQ ID NO: 1269 - RNA, 19 nt, Artificial Sequence
  source: /note="Description of Artificial Sequence: Synthetic oligonucleotide"
augguguuucagaacugag

SEQ ID NO: 1270 - RNA, 19 nt, Artificial Sequence
  source: /note="Description of Artificial Sequence: Synthetic oligonucleotide"
uccuggaauauuagaugcc

SEQ ID NO: 1271 - RNA, 19 nt, Artificial Sequence
  source: /note="Description of Artificial Sequence: Synthetic oligonucleotide"
aggaccagauugcuuacuc

SEQ ID NO: 1272 - RNA, 19 nt, Artificial Sequence
  source: /note="Description of Artificial Sequence: Synthetic oligonucleotide"
uggugacacccugacucuc

SEQ ID NO: 1273 - RNA, 19 nt, Artificial Sequence
  source: /note="Description of Artificial Sequence: Synthetic oligonucleotide"
auuugacuucuuuuuuaag

SEQ ID NO: 1274 - RNA, 19 nt, Artificial Sequence
  source: /note="Description of Artificial Sequence: Synthetic oligonucleotide"
cuucaggcccaauauugua

SEQ ID NO: 1275 - RNA, 19 nt, Artificial Sequence
  source: /note="Description of Artificial Sequence: Synthetic oligonucleotide"
uggaagcuacuuugacuag

SEQ ID NO: 1276 - RNA, 19 nt, Artificial Sequence
  source: /note="Description of Artificial Sequence: Synthetic oligonucleotide"
uaaccagcuuccugaaguc

SEQ ID NO: 1277 - RNA, 19 nt, Artificial Sequence
  source: /note="Description of Artificial Sequence: Synthetic oligonucleotide"
aaaaauguucucaaaaaug

SEQ ID NO: 1278 - RNA, 19 nt, Artificial Sequence
  source: /note="Description of Artificial Sequence: Synthetic oligonucleotide"
uagcagacuuguuccgacc

SEQ ID NO: 1279 - RNA, 19 nt, Artificial Sequence
  source: /note="Description of Artificial Sequence: Synthetic oligonucleotide"
uuccccucagcuaaugacg

SEQ ID NO: 1280 - RNA, 19 nt, Artificial Sequence
  source: /note="Description of Artificial Sequence: Synthetic oligonucleotide"
ugggcaguauuuugugcug

SEQ ID NO: 1281 - RNA, 19 nt, Artificial Sequence
  source: /note="Description of Artificial Sequence: Synthetic oligonucleotide"
acccaaggaccagauugcu

SEQ ID NO: 1282 - RNA, 19 nt, Artificial Sequence
  source: /note="Description of Artificial Sequence: Synthetic oligonucleotide"
ggaagcuacuuugacuagu

SEQ ID NO: 1283 - RNA, 19 nt, Artificial Sequence
  source: /note="Description of Artificial Sequence: Synthetic oligonucleotide"
cccaauauuguaauuucag

SEQ ID NO: 1284 - RNA, 19 nt, Artificial Sequence
  source: /note="Description of Artificial Sequence: Synthetic oligonucleotide"
cuuugggcaguauuuugug

SEQ ID NO: 1285 - RNA, 19 nt, Artificial Sequence
  source: /note="Description of Artificial Sequence: Synthetic oligonucleotide"
uuguuuaaaacccaauauc

SEQ ID NO: 1286 - RNA, 19 nt, Artificial Sequence
  source: /note="Description of Artificial Sequence: Synthetic oligonucleotide"
ccugguccugauuucccug

SEQ ID NO: 1287 - RNA, 19 nt, Artificial Sequence
  source: /note="Description of Artificial Sequence: Synthetic oligonucleotide"
uuccagaugcauuuuaacc

SEQ ID NO: 1288 - RNA, 19 nt, Artificial Sequence
  source: /note="Description of Artificial Sequence: Synthetic oligonucleotide"
aaaugacaacacuugaagc

SEQ ID NO: 1289 - RNA, 19 nt, Artificial Sequence
  source: /note="Description of Artificial Sequence: Synthetic oligonucleotide"
ccaaauauggcuggaaugc

SEQ ID NO: 1290 - RNA, 19 nt, Artificial Sequence
  source: /note="Description of Artificial Sequence: Synthetic oligonucleotide"
cucaaugcuucaauguccc

SEQ ID NO: 1291 - RNA, 19 nt, Artificial Sequence
  source: /note="Description of Artificial Sequence: Synthetic oligonucleotide"
accagcuuccugaagucac

SEQ ID NO: 1292 - RNA, 19 nt, Artificial Sequence
  source: /note="Description of Artificial Sequence: Synthetic oligonucleotide"
ccuuggauuugacuucuuu

SEQ ID NO: 1293 - RNA, 19 nt, Artificial Sequence
  source: /note="Description of Artificial Sequence: Synthetic oligonucleotide"
uuccauagaucuggaucug

SEQ ID NO: 1294 - RNA, 19 nt, Artificial Sequence
  source: /note="Description of Artificial Sequence: Synthetic oligonucleotide"
aacuucaggcccaauauug

SEQ ID NO: 1295 - RNA, 19 nt, Artificial Sequence
  source: /note="Description of Artificial Sequence: Synthetic oligonucleotide"
aagaguuaucgccagugug

SEQ ID NO: 1296 - RNA, 19 nt, Artificial Sequence
  source: /note="Description of Artificial Sequence: Synthetic oligonucleotide"
ucaggaugcgaugucuaug

SEQ ID NO: 1297 - RNA, 19 nt, Artificial Sequence
  source: /note="Description of Artificial Sequence: Synthetic oligonucleotide"
uccagaugcauuuuaacca

SEQ ID NO: 1298 - RNA, 19 nt, Artificial Sequence
  source: /note="Description of Artificial Sequence: Synthetic oligonucleotide"
acugaggugaccuucagga

SEQ ID NO: 1299 - RNA, 19 nt, Artificial Sequence
  source: /note="Description of Artificial Sequence: Synthetic oligonucleotide"
gauuugacuucuuuuuuaa

SEQ ID NO: 1300 - RNA, 19 nt, Artificial Sequence
  source: /note="Description of Artificial Sequence: Synthetic oligonucleotide"
cugguccugauuucccuga

SEQ ID NO: 1301 - RNA, 19 nt, Artificial Sequence
  source: /note="Description of Artificial Sequence: Synthetic oligonucleotide"
acacugaagaguuaucgcc

SEQ ID NO: 1302 - RNA, 19 nt, Artificial Sequence
  source: /note="Description of Artificial Sequence: Synthetic oligonucleotide"
aaaucaccacucuuugggc

SEQ ID NO: 1303 - RNA, 19 nt, Artificial Sequence
  source: /note="Description of Artificial Sequence: Synthetic oligonucleotide"
acccagggaccaucaaagu

SEQ ID NO: 1304 - RNA, 19 nt, Artificial Sequence
  source: /note="Description of Artificial Sequence: Synthetic oligonucleotide"
cccagggaccaucaaagug

SEQ ID NO: 1305 - RNA, 19 nt, Artificial Sequence
  source: /note="Description of Artificial Sequence: Synthetic oligonucleotide"
ugacaacacuugaagcaug

SEQ ID NO: 1306 - RNA, 19 nt, Artificial Sequence
  source: /note="Description of Artificial Sequence: Synthetic oligonucleotide"
uucuuauuggugacgugga

SEQ ID NO: 1307 - RNA, 19 nt, Artificial Sequence
  source: /note="Description of Artificial Sequence: Synthetic oligonucleotide"
cacuucgagccucacaugc

SEQ ID NO: 1308 - RNA, 19 nt, Artificial Sequence
  source: /note="Description of Artificial Sequence: Synthetic oligonucleotide"
cuucuuauuggugacgugg

SEQ ID NO: 1309 - RNA, 19 nt, Artificial Sequence
  source: /note="Description of Artificial Sequence: Synthetic oligonucleotide"
auggaauaguucuuucucc

SEQ ID NO: 1310 - RNA, 19 nt, Artificial Sequence
  source: /note="Description of Artificial Sequence: Synthetic oligonucleotide"
aaaaucaccacucuuuggg

SEQ ID NO: 1311 - RNA, 19 nt, Artificial Sequence
  source: /note="Description of Artificial Sequence: Synthetic oligonucleotide"
cuuggauuugacuucuuuu

SEQ ID NO: 1312 - RNA, 19 nt, Artificial Sequence
  source: /note="Description of Artificial Sequence: Synthetic oligonucleotide"
uguccuggaauauuagaug

SEQ ID NO: 1313 - RNA, 19 nt, Artificial Sequence
  source: /note="Description of Artificial Sequence: Synthetic oligonucleotide"
aggagggaaacaugguuac

SEQ ID NO: 1314 - RNA, 19 nt, Artificial Sequence
  source: /note="Description of Artificial Sequence: Synthetic oligonucleotide"
aagcaaccaacuucaggcc

SEQ ID NO: 1315 - RNA, 19 nt, Artificial Sequence
  source: /note="Description of Artificial Sequence: Synthetic oligonucleotide"
augucaguuguuuaaaacc

SEQ ID NO: 1316 - RNA, 19 nt, Artificial Sequence
  source: /note="Description of Artificial Sequence: Synthetic oligonucleotide"
uaugucaguuguuuaaaac

SEQ ID NO: 1317 - RNA, 19 nt, Artificial Sequence
  source: /note="Description of Artificial Sequence: Synthetic oligonucleotide"
aauuucaggaugcgauguc

SEQ ID NO: 1318 - RNA, 19 nt, Artificial Sequence
  source: /note="Description of Artificial Sequence: Synthetic oligonucleotide"
uucaggcccaauauuguaa

SEQ ID NO: 1319 - RNA, 19 nt, Artificial Sequence
  source: /note="Description of Artificial Sequence: Synthetic oligonucleotide"
ucagacagcauuggauuuc

SEQ ID NO: 1320 - RNA, 19 nt, Artificial Sequence
  source: /note="Description of Artificial Sequence: Synthetic oligonucleotide"
aagcuacuuugacuaguuu

SEQ ID NO: 1321 - RNA, 19 nt, Artificial Sequence
  source: /note="Description of Artificial Sequence: Synthetic oligonucleotide"
gggaccaucaaagugggag

SEQ ID NO: 1322 - RNA, 19 nt, Artificial Sequence
  source: /note="Description of Artificial Sequence: Synthetic oligonucleotide"
ugacacccugacucucagu

SEQ ID NO: 1323 - RNA, 19 nt, Artificial Sequence
  source: /note="Description of Artificial Sequence: Synthetic oligonucleotide"
caauauuguaauuucagga

SEQ ID NO: 1324 - RNA, 19 nt, Artificial Sequence
  source: /note="Description of Artificial Sequence: Synthetic oligonucleotide"
aaagcaaccaacuucaggc

SEQ ID NO: 1325 - RNA, 19 nt, Artificial Sequence
  source: /note="Description of Artificial Sequence: Synthetic oligonucleotide"
ugcuuacucagacaccagc

SEQ ID NO: 1326 - RNA, 19 nt, Artificial Sequence
  source: /note="Description of Artificial Sequence: Synthetic oligonucleotide"
aggcccaauauuguaauuu

SEQ ID NO: 1327 - RNA, 19 nt, Artificial Sequence
  source: /note="Description of Artificial Sequence: Synthetic oligonucleotide"
ucuuuccuuggauuugacu

SEQ ID NO: 1328 - RNA, 19 nt, Artificial Sequence
  source: /note="Description of Artificial Sequence: Synthetic oligonucleotide"
ugggccaguaaugggaacc

SEQ ID NO: 1329 - RNA, 19 nt, Artificial Sequence
  source: /note="Description of Artificial Sequence: Synthetic oligonucleotide"
agcaaccaacuucaggccc

SEQ ID NO: 1330 - RNA, 19 nt, Artificial Sequence
  source: /note="Description of Artificial Sequence: Synthetic oligonucleotide"
uuuuuuaaggauucuuggg

SEQ ID NO: 1331 - RNA, 19 nt, Artificial Sequence
  source: /note="Description of Artificial Sequence: Synthetic oligonucleotide"
uggauuugacuucuuuuuu

SEQ ID NO: 1332 - RNA, 19 nt, Artificial Sequence
  source: /note="Description of Artificial Sequence: Synthetic oligonucleotide"
agggaccaucaaaguggga

SEQ ID NO: 1333 - RNA, 19 nt, Artificial Sequence
  source: /note="Description of Artificial Sequence: Synthetic oligonucleotide"
gacacccugacucucagug

SEQ ID NO: 1334 - RNA, 19 nt, Artificial Sequence
  source: /note="Description of Artificial Sequence: Synthetic oligonucleotide"
acgcccaccacaaaugcag

SEQ ID NO: 1335 - RNA, 19 nt, Artificial Sequence
  source: /note="Description of Artificial Sequence: Synthetic oligonucleotide"
uuuuuuauugccauuuugu

SEQ ID NO: 1336 - RNA, 19 nt, Artificial Sequence
  source: /note="Description of Artificial Sequence: Synthetic oligonucleotide"
uuuccuaaaggugcucagg

SEQ ID NO: 1337 - RNA, 19 nt, Artificial Sequence
  source: /note="Description of Artificial Sequence: Synthetic oligonucleotide"
uuaaaacugugaauaaaug

SEQ ID NO: 1338 - RNA, 19 nt, Artificial Sequence
  source: /note="Description of Artificial Sequence: Synthetic oligonucleotide"
aucuuuccuuggauuugac

SEQ ID NO: 1339 - RNA, 19 nt, Artificial Sequence
  source: /note="Description of Artificial Sequence: Synthetic oligonucleotide"
aucaccacucuuugggcag

SEQ ID NO: 1340 - RNA, 19 nt, Artificial Sequence
  source: /note="Description of Artificial Sequence: Synthetic oligonucleotide"
uggauccuugccauucccc

SEQ ID NO: 1341 - RNA, 19 nt, Artificial Sequence
  source: /note="Description of Artificial Sequence: Synthetic oligonucleotide"
ugaggugaccuucaggaag

SEQ ID NO: 1342 - RNA, 19 nt, Artificial Sequence
  source: /note="Description of Artificial Sequence: Synthetic oligonucleotide"
agcuucuuauuggugacgu

SEQ ID NO: 1343 - RNA, 19 nt, Artificial Sequence
  source: /note="Description of Artificial Sequence: Synthetic oligonucleotide"
acacccugacucucagugc

SEQ ID NO: 1344 - RNA, 19 nt, Artificial Sequence
  source: /note="Description of Artificial Sequence: Synthetic oligonucleotide"
uuggauuugacuucuuuuu

SEQ ID NO: 1345 - RNA, 19 nt, Artificial Sequence
  source: /note="Description of Artificial Sequence: Synthetic oligonucleotide"
auuuugugcuggaaaaccc

SEQ ID NO: 1346 - RNA, 19 nt, Artificial Sequence
  source: /note="Description of Artificial Sequence: Synthetic oligonucleotide"
gaaguauauuuuuuauugc

SEQ ID NO: 1347 - RNA, 19 nt, Artificial Sequence
  source: /note="Description of Artificial Sequence: Synthetic oligonucleotide"
uacugaaaaccuuuaaagg

SEQ ID NO: 1348 - RNA, 19 nt, Artificial Sequence
  source: /note="Description of Artificial Sequence: Synthetic oligonucleotide"
aauagcagacuuguuccga

SEQ ID NO: 1349 - RNA, 19 nt, Artificial Sequence
  source: /note="Description of Artificial Sequence: Synthetic oligonucleotide"
auuuuuuauugccauuuug

SEQ ID NO: 1350 - RNA, 19 nt, Artificial Sequence
  source: /note="Description of Artificial Sequence: Synthetic oligonucleotide"
uugggcaguauuuugugcu

SEQ ID NO: 1351 - RNA, 19 nt, Artificial Sequence
  source: /note="Description of Artificial Sequence: Synthetic oligonucleotide"
ucucaaugcuucaaugucc

SEQ ID NO: 1352 - RNA, 19 nt, Artificial Sequence
  source: /note="Description of Artificial Sequence: Synthetic oligonucleotide"
uuaaauuugugauuuucac

SEQ ID NO: 1353 - RNA, 19 nt, Artificial Sequence
  source: /note="Description of Artificial Sequence: Synthetic oligonucleotide"
ucagaacgaaaguuauaug

SEQ ID NO: 1354 - RNA, 19 nt, Artificial Sequence
  source: /note="Description of Artificial Sequence: Synthetic oligonucleotide"
uuuauugccauuuuguccu

SEQ ID NO: 1355 - RNA, 19 nt, Artificial Sequence
  source: /note="Description of Artificial Sequence: Synthetic oligonucleotide"
uuugggcaguauuuugugc

SEQ ID NO: 1356 - RNA, 19 nt, Artificial Sequence
  source: /note="Description of Artificial Sequence: Synthetic oligonucleotide"
aaauguuuuuaaaacugug

SEQ ID NO: 1357 - RNA, 19 nt, Artificial Sequence
  source: /note="Description of Artificial Sequence: Synthetic oligonucleotide"
acugaaaaccuuuaaaggg

SEQ ID NO: 1358 - RNA, 19 nt, Artificial Sequence
  source: /note="Description of Artificial Sequence: Synthetic oligonucleotide"
uugugaucaaccaggaggg

SEQ ID NO: 1359 - RNA, 19 nt, Artificial Sequence
  source: /note="Description of Artificial Sequence: Synthetic oligonucleotide"
cauuuucuuuaaauuugug

SEQ ID NO: 1360 - RNA, 19 nt, Artificial Sequence
  source: /note="Description of Artificial Sequence: Synthetic oligonucleotide"
cuuuuuuaaggauucuugg

SEQ ID NO: 1361 - RNA, 19 nt, Artificial Sequence
  source: /note="Description of Artificial Sequence: Synthetic oligonucleotide"
aaacgcccaccacaaaugc

SEQ ID NO: 1362 - RNA, 19 nt, Artificial Sequence
  source: /note="Description of Artificial Sequence: Synthetic oligonucleotide"
aaauagcagacuuguuccg

SEQ ID NO: 1363 - RNA, 19 nt, Artificial Sequence
  source: /note="Description of Artificial Sequence: Synthetic oligonucleotide"
gagcuucuuauuggugacg

SEQ ID NO: 1364 - RNA, 19 nt, Artificial Sequence
  source: /note="Description of Artificial Sequence: Synthetic oligonucleotide"
cagauauuaauuuuccaua

SEQ ID NO: 1365 - RNA, 19 nt, Artificial Sequence
  source: /note="Description of Artificial Sequence: Synthetic oligonucleotide"
uauuguaauuucaggaugc

SEQ ID NO: 1366 - RNA, 19 nt, Artificial Sequence
  source: /note="Description of Artificial Sequence: Synthetic oligonucleotide"
ugugauuuucacauuuuuc

SEQ ID NO: 1367 - RNA, 19 nt, Artificial Sequence
  source: /note="Description of Artificial Sequence: Synthetic oligonucleotide"
ugacguggaacugaaaagg

SEQ ID NO: 1368 - RNA, 19 nt, Artificial Sequence
  source: /note="Description of Artificial Sequence: Synthetic oligonucleotide"
gaaagaggaagagugggug

SEQ ID NO: 1369 - RNA, 19 nt, Artificial Sequence
  source: /note="Description of Artificial Sequence: Synthetic oligonucleotide"
uuuccuuggauuugacuuc

SEQ ID NO: 1370 - RNA, 19 nt, Artificial Sequence
  source: /note="Description of Artificial Sequence: Synthetic oligonucleotide"
ugauccuuucugaggcguc

SEQ ID NO: 1371 - RNA, 19 nt, Artificial Sequence
  source: /note="Description of Artificial Sequence: Synthetic oligonucleotide"
augucuaugcagagguaac

SEQ ID NO: 1372 - RNA, 19 nt, Artificial Sequence
  source: /note="Description of Artificial Sequence: Synthetic oligonucleotide"
ucaggcccaauauuguaau

SEQ ID NO: 1373 - RNA, 19 nt, Artificial Sequence
  source: /note="Description of Artificial Sequence: Synthetic oligonucleotide"
cuuuaaauuugugauuuuc

SEQ ID NO: 1374 - RNA, 19 nt, Artificial Sequence
  source: /note="Description of Artificial Sequence: Synthetic oligonucleotide"
acuucuuuuuuaaggauuc

SEQ ID NO: 1375 - RNA, 19 nt, Artificial Sequence
  source: /note="Description of Artificial Sequence: Synthetic oligonucleotide"
uucgagccucacaugcgac

SEQ ID NO: 1376 - RNA, 19 nt, Artificial Sequence
  source: /note="Description of Artificial Sequence: Synthetic oligonucleotide"
uuuuccauagaucuggauc

SEQ ID NO: 1377 - RNA, 19 nt, Artificial Sequence
  source: /note="Description of Artificial Sequence: Synthetic oligonucleotide"
uauggaauaguucuuucuc

SEQ ID NO: 1378 - RNA, 19 nt, Artificial Sequence
  source: /note="Description of Artificial Sequence: Synthetic oligonucleotide"
gacguggaacugaaaaggg

SEQ ID NO: 1379 - RNA, 19 nt, Artificial Sequence
  source: /note="Description of Artificial Sequence: Synthetic oligonucleotide"
auuaauuuuccauagaucu

SEQ ID NO: 1380 - RNA, 19 nt, Artificial Sequence
  source: /note="Description of Artificial Sequence: Synthetic oligonucleotide"
ugcagccuacacaaaggac

SEQ ID NO: 1381 - RNA, 19 nt, Artificial Sequence
  source: /note="Description of Artificial Sequence: Synthetic oligonucleotide"
aaccaggagggaaacaugg

SEQ ID NO: 1382 - RNA, 19 nt, Artificial Sequence
  source: /note="Description of Artificial Sequence: Synthetic oligonucleotide"
uaauuuuccauagaucugg

SEQ ID NO: 1383 - RNA, 19 nt, Artificial Sequence
  source: /note="Description of Artificial Sequence: Synthetic oligonucleotide"
ugucaguuguuuaaaaccc

SEQ ID NO: 1384 - RNA, 19 nt, Artificial Sequence
  source: /note="Description of Artificial Sequence: Synthetic oligonucleotide"
uugaagcaugguguuucag

SEQ ID NO: 1385 - RNA, 19 nt, Artificial Sequence
  source: /note="Description of Artificial Sequence: Synthetic oligonucleotide"
ucgccugguccugauuucc

SEQ ID NO: 1386 - RNA, 19 nt, Artificial Sequence
  source: /note="Description of Artificial Sequence: Synthetic oligonucleotide"
uaaaacugugaauaaaugg

SEQ ID NO: 1387 - RNA, 19 nt, Artificial Sequence
  source: /note="Description of Artificial Sequence: Synthetic oligonucleotide"
uuggauuuccuaaaggugc

SEQ ID NO: 1388 - RNA, 19 nt, Artificial Sequence
  source: /note="Description of Artificial Sequence: Synthetic oligonucleotide"
aaguauauuuuuuauugcc

SEQ ID NO: 1389 - RNA, 19 nt, Artificial Sequence
  source: /note="Description of Artificial Sequence: Synthetic oligonucleotide"
uauuaauuuuccauagauc

SEQ ID NO: 1390 - RNA, 19 nt, Artificial Sequence
  source: /note="Description of Artificial Sequence: Synthetic oligonucleotide"
auauuguaauuucaggaug

SEQ ID NO: 1391 - RNA, 19 nt, Artificial Sequence
  source: /note="Description of Artificial Sequence: Synthetic oligonucleotide"
auccuuucugaggcgucgc

SEQ ID NO: 1392 - RNA, 19 nt, Artificial Sequence
  source: /note="Description of Artificial Sequence: Synthetic oligonucleotide"
uuuuuauugccauuuuguc

SEQ ID NO: 1393 - RNA, 19 nt, Artificial Sequence
  source: /note="Description of Artificial Sequence: Synthetic oligonucleotide"
uagagaagaaaguuaaagc

SEQ ID NO: 1394 - RNA, 19 nt, Artificial Sequence
  source: /note="Description of Artificial Sequence: Synthetic oligonucleotide"
uuugacuucuuuuuuaagg

SEQ ID NO: 1395 - RNA, 19 nt, Artificial Sequence
  source: /note="Description of Artificial Sequence: Synthetic oligonucleotide"
gcccaccacaaaugcagug

SEQ ID NO: 1396 - RNA, 19 nt, Artificial Sequence
  source: /note="Description of Artificial Sequence: Synthetic oligonucleotide"
uaaagcaaccaacuucagg

SEQ ID NO: 1397 - RNA, 19 nt, Artificial Sequence
  source: /note="Description of Artificial Sequence: Synthetic oligonucleotide"
uuaaagcaaccaacuucag

SEQ ID NO: 1398 - RNA, 19 nt, Artificial Sequence
  source: /note="Description of Artificial Sequence: Synthetic oligonucleotide"
uuguuccgacccaaggacc

SEQ ID NO: 1399 - RNA, 19 nt, Artificial Sequence
  source: /note="Description of Artificial Sequence: Synthetic oligonucleotide"
uuaauuuuccauagaucug

SEQ ID NO: 1400 - RNA, 19 nt, Artificial Sequence
  source: /note="Description of Artificial Sequence: Synthetic oligonucleotide"
aacacugaagaguuaucgc

SEQ ID NO: 1401 - RNA, 19 nt, Artificial Sequence
  source: /note="Description of Artificial Sequence: Synthetic oligonucleotide"
gacuucuuuuuuaaggauu

SEQ ID NO: 1402 - RNA, 19 nt, Artificial Sequence
  source: /note="Description of Artificial Sequence: Synthetic oligonucleotide"
ugacuucuuuuuuaaggau

SEQ ID NO: 1403 - RNA, 19 nt, Artificial Sequence
  source: /note="Description of Artificial Sequence: Synthetic oligonucleotide"
uugacuucuuuuuuaagga

SEQ ID NO: 1404 - RNA, 19 nt, Artificial Sequence
  source: /note="Description of Artificial Sequence: Synthetic oligonucleotide"
aaacacugaagaguuaucg

SEQ ID NO: 1405 - RNA, 19 nt, Artificial Sequence
  source: /note="Description of Artificial Sequence: Synthetic oligonucleotide"
auuauggaauaguucuuuc

SEQ ID NO: 1406 - RNA, 19 nt, Artificial Sequence
  source: /note="Description of Artificial Sequence: Synthetic oligonucleotide"
uuuuaaggauucuugggau

SEQ ID NO: 1407 - RNA, 19 nt, Artificial Sequence
  source: /note="Description of Artificial Sequence: Synthetic oligonucleotide"
ucuuuuuuaaggauucuug

SEQ ID NO: 1408 - RNA, 19 nt, Artificial Sequence
  source: /note="Description of Artificial Sequence: Synthetic oligonucleotide"
uuuuuaaggauucuuggga

SEQ ID NO: 1409 - RNA, 19 nt, Artificial Sequence
  source: /note="Description of Artificial Sequence: Synthetic oligonucleotide"
auuuuaaccacaguggacc

SEQ ID NO: 1410 - RNA, 19 nt, Artificial Sequence
  source: /note="Description of Artificial Sequence: Synthetic oligonucleotide"
uuuuauugccauuuugucc

SEQ ID NO: 1411 - RNA, 19 nt, Artificial Sequence
  source: /note="Description of Artificial Sequence: Synthetic oligonucleotide"
auaacuuucguucugaagg

SEQ ID NO: 1412 - RNA, 19 nt, Artificial Sequence
  source: /note="Description of Artificial Sequence: Synthetic oligonucleotide"
uuccauauaacuuucguuc

SEQ ID NO: 1413 - RNA, 19 nt, Artificial Sequence
  source: /note="Description of Artificial Sequence: Synthetic oligonucleotide"
uagauauuggguuuuaaac

SEQ ID NO: 1414 - RNA, 19 nt, Artificial Sequence
  source: /note="Description of Artificial Sequence: Synthetic oligonucleotide"
ucuaauauuccaggacaua

SEQ ID NO: 1415 - RNA, 19 nt, Artificial Sequence
  source: /note="Description of Artificial Sequence: Synthetic oligonucleotide"
cuaauauuccaggacauac

SEQ ID NO: 1416 - RNA, 19 nt, Artificial Sequence
  source: /note="Description of Artificial Sequence: Synthetic oligonucleotide"
aacuuucguucugaagggu

SEQ ID NO: 1417 - RNA, 19 nt, Artificial Sequence
  source: /note="Description of Artificial Sequence: Synthetic oligonucleotide"
ugaaauuacaauauugggc

SEQ ID NO: 1418 - RNA, 19 nt, Artificial Sequence
  source: /note="Description of Artificial Sequence: Synthetic oligonucleotide"
ucucccacuuugauggucc

SEQ ID NO: 1419 - RNA, 19 nt, Artificial Sequence
  source: /note="Description of Artificial Sequence: Synthetic oligonucleotide"
ugcccaaagaguggugauu

SEQ ID NO: 1420 - RNA, 19 nt, Artificial Sequence
  source: /note="Description of Artificial Sequence: Synthetic oligonucleotide"
caaaauacugcccaaagag

SEQ ID NO: 1421 - RNA, 19 nt, Artificial Sequence
  source: /note="Description of Artificial Sequence: Synthetic oligonucleotide"
ucugcauagacaucgcauc

SEQ ID NO: 1422 - RNA, 19 nt, Artificial Sequence
  source: /note="Description of Artificial Sequence: Synthetic oligonucleotide"
caaagaguggugauuuucc

SEQ ID NO: 1423 - RNA, 19 nt, Artificial Sequence
  source: /note="Description of Artificial Sequence: Synthetic oligonucleotide"
ugucauuuuugagaacauu

SEQ ID NO: 1424 - RNA, 19 nt, Artificial Sequence
  source: /note="Description of Artificial Sequence: Synthetic oligonucleotide"
guugaucacaagccaaaac

SEQ ID NO: 1425 - RNA, 19 nt, Artificial Sequence
  source: /note="Description of Artificial Sequence: Synthetic oligonucleotide"
acugaaucacuuuucuucu

SEQ ID NO: 1426 - RNA, 19 nt, Artificial Sequence
  source: /note="Description of Artificial Sequence: Synthetic oligonucleotide"
aaaaauauacuucaucaga

SEQ ID NO: 1427 - RNA, 19 nt, Artificial Sequence
  source: /note="Description of Artificial Sequence: Synthetic oligonucleotide"
gaaauuacaauauugggcc

SEQ ID NO: 1428 - RNA, 19 nt, Artificial Sequence
  source: /note="Description of Artificial Sequence: Synthetic oligonucleotide"
cugcauagacaucgcaucc

SEQ ID NO: 1429 - RNA, 19 nt, Artificial Sequence
  source: /note="Description of Artificial Sequence: Synthetic oligonucleotide"
ucauuuuugagaacauuuu

SEQ ID NO: 1430 - RNA, 19 nt, Artificial Sequence
  source: /note="Description of Artificial Sequence: Synthetic oligonucleotide"
aucgcauccugaaauuaca

SEQ ID NO: 1431 - RNA, 19 nt, Artificial Sequence
  source: /note="Description of Artificial Sequence: Synthetic oligonucleotide"
aacuauuccauaaucaguu

SEQ ID NO: 1432 - RNA, 19 nt, Artificial Sequence
  source: /note="Description of Artificial Sequence: Synthetic oligonucleotide"
aaacaccaugcuucaagug

SEQ ID NO: 1433 - RNA, 19 nt, Artificial Sequence
  source: /note="Description of Artificial Sequence: Synthetic oligonucleotide"
aacaccaugcuucaagugu

SEQ ID NO: 1434 - RNA, 19 nt, Artificial Sequence
  source: /note="Description of Artificial Sequence: Synthetic oligonucleotide"
ucauuagcugaggggaaug

SEQ ID NO: 1435 - RNA, 19 nt, Artificial Sequence
  source: /note="Description of Artificial Sequence: Synthetic oligonucleotide"
gauaacucuucaguguuuc

SEQ ID NO: 1436 - RNA, 19 nt, Artificial Sequence
  source: /note="Description of Artificial Sequence: Synthetic oligonucleotide"
ugaguaagcaaucuggucc

SEQ ID NO: 1437 - RNA, 19 nt, Artificial Sequence
  source: /note="Description of Artificial Sequence: Synthetic oligonucleotide"
aaucaaaggacaaaauggc

SEQ ID NO: 1438 - RNA, 19 nt, Artificial Sequence
  source: /note="Description of Artificial Sequence: Synthetic oligonucleotide"
aaaauacugcccaaagagu

SEQ ID NO: 1439 - RNA, 19 nt, Artificial Sequence
  source: /note="Description of Artificial Sequence: Synthetic oligonucleotide"
uccuccugagcaccuuuag

SEQ ID NO: 1440 - RNA, 19 nt, Artificial Sequence
  source: /note="Description of Artificial Sequence: Synthetic oligonucleotide"
ucugaagggucacacuggc

SEQ ID NO: 1441 - RNA, 19 nt, Artificial Sequence
  source: /note="Description of Artificial Sequence: Synthetic oligonucleotide"
cugaaucacuuuucuucuc

SEQ ID NO: 1442 - RNA, 19 nt, Artificial Sequence
  source: /note="Description of Artificial Sequence: Synthetic oligonucleotide"
cauguuucccuccugguug

SEQ ID NO: 1443 - RNA, 19 nt, Artificial Sequence
  source: /note="Description of Artificial Sequence: Synthetic oligonucleotide"
ugcuuuaacuuucuucucu

SEQ ID NO: 1444 - RNA, 19 nt, Artificial Sequence
  source: /note="Description of Artificial Sequence: Synthetic oligonucleotide"
guacacagggucucccacu

SEQ ID NO: 1445 - RNA, 19 nt, Artificial Sequence
  source: /note="Description of Artificial Sequence: Synthetic oligonucleotide"
ccuuuaggaaauccaaugc

SEQ ID NO: 1446 - RNA, 19 nt, Artificial Sequence
  source: /note="Description of Artificial Sequence: Synthetic oligonucleotide"
aaugcaucuggaacaagcc

SEQ ID NO: 1447 - RNA, 19 nt, Artificial Sequence
  source: /note="Description of Artificial Sequence: Synthetic oligonucleotide"
gagcaccuuuaggaaaucc

SEQ ID NO: 1448 - RNA, 19 nt, Artificial Sequence
  source: /note="Description of Artificial Sequence: Synthetic oligonucleotide"
uuucguucugaagggucac

SEQ ID NO: 1449 - RNA, 19 nt, Artificial Sequence
  source: /note="Description of Artificial Sequence: Synthetic oligonucleotide"
ggaaauccaaugcugucug

SEQ ID NO: 1450 - RNA, 19 nt, Artificial Sequence
  source: /note="Description of Artificial Sequence: Synthetic oligonucleotide"
uccacugugguuaaaaugc

SEQ ID NO: 1451 - RNA, 19 nt, Artificial Sequence
  source: /note="Description of Artificial Sequence: Synthetic oligonucleotide"
aaucacuuuucuucuccuc

SEQ ID NO: 1452 - RNA, 19 nt, Artificial Sequence
  source: /note="Description of Artificial Sequence: Synthetic oligonucleotide"
gugauuuuccauauaacuu

SEQ ID NO: 1453 - RNA, 19 nt, Artificial Sequence
  source: /note="Description of Artificial Sequence: Synthetic oligonucleotide"
ggugauuuuccauauaacu

SEQ ID NO: 1454 - RNA, 19 nt, Artificial Sequence
  source: /note="Description of Artificial Sequence: Synthetic oligonucleotide"
agauauuggguuuuaaaca

SEQ ID NO: 1455 - RNA, 19 nt, Artificial Sequence
  source: /note="Description of Artificial Sequence: Synthetic oligonucleotide"
uuccacgucaccaauaaga

SEQ ID NO: 1456 - RNA, 19 nt, Artificial Sequence
  source: /note="Description of Artificial Sequence: Synthetic oligonucleotide"
acuuucguucugaaggguc

SEQ ID NO: 1457 - RNA, 19 nt, Artificial Sequence
  source: /note="Description of Artificial Sequence: Synthetic oligonucleotide"
acuucaucagaucuuagag

SEQ ID NO: 1458 - RNA, 19 nt, Artificial Sequence
  source: /note="Description of Artificial Sequence: Synthetic oligonucleotide"
uauacuucaucagaucuua

SEQ ID NO: 1459 - RNA, 19 nt, Artificial Sequence
  source: /note="Description of Artificial Sequence: Synthetic oligonucleotide"
acugcccaaagagugguga

SEQ ID NO: 1460 - RNA, 19 nt, Artificial Sequence
  source: /note="Description of Artificial Sequence: Synthetic oligonucleotide"
uaagcaaucugguccuugg

SEQ ID NO: 1461 - RNA, 19 nt, Artificial Sequence
  source: /note="Description of Artificial Sequence: Synthetic oligonucleotide"
guuaaaaugcaucuggaac

SEQ ID NO: 1462 - RNA, 19 nt, Artificial Sequence
  source: /note="Description of Artificial Sequence: Synthetic oligonucleotide"
acauuuuucaaguuuaguc

SEQ ID NO: 1463 - RNA, 19 nt, Artificial Sequence
  source: /note="Description of Artificial Sequence: Synthetic oligonucleotide"
ugcauagacaucgcauccu

SEQ ID NO: 1464 - RNA, 19 nt, Artificial Sequence
  source: /note="Description of Artificial Sequence: Synthetic oligonucleotide"
accuuuaggaaauccaaug

SEQ ID NO: 1465 - RNA, 19 nt, Artificial Sequence
  source: /note="Description of Artificial Sequence: Synthetic oligonucleotide"
aaauauacuucaucagauc

SEQ ID NO: 1466 - RNA, 19 nt, Artificial Sequence
  source: /note="Description of Artificial Sequence: Synthetic oligonucleotide"
gucaaaguagcuuccauuu

SEQ ID NO: 1467 - RNA, 19 nt, Artificial Sequence
  source: /note="Description of Artificial Sequence: Synthetic oligonucleotide"
cuucaucagaucuuagagu

SEQ ID NO: 1468 - RNA, 19 nt, Artificial Sequence
  source: /note="Description of Artificial Sequence: Synthetic oligonucleotide"
cugaguaagcaaucugguc

SEQ ID NO: 1469 - RNA, 19 nt, Artificial Sequence
  source: /note="Description of Artificial Sequence: Synthetic oligonucleotide"
gucucccacuuugaugguc

SEQ ID NO: 1470 - RNA, 19 nt, Artificial Sequence
  source: /note="Description of Artificial Sequence: Synthetic oligonucleotide"
caaguuuagucaacuuccc

SEQ ID NO: 1471 - RNA, 19 nt, Artificial Sequence
  source: /note="Description of Artificial Sequence: Synthetic oligonucleotide"
agaacuauuccauaaucag

SEQ ID NO: 1472 - RNA, 19 nt, Artificial Sequence
  source: /note="Description of Artificial Sequence: Synthetic oligonucleotide"
gaaucacuuuucuucuccu

SEQ ID NO: 1473 - RNA, 19 nt, Artificial Sequence
  source: /note="Description of Artificial Sequence: Synthetic oligonucleotide"
uaaucaaaggacaaaaugg

SEQ ID NO: 1474 - RNA, 19 nt, Artificial Sequence
  source: /note="Description of Artificial Sequence: Synthetic oligonucleotide"
gucauuuuugagaacauuu

SEQ ID NO: 1475 - RNA, 19 nt, Artificial Sequence
  source: /note="Description of Artificial Sequence: Synthetic oligonucleotide"
uuaaaaugcaucuggaaca

SEQ ID NO: 1476 - RNA, 19 nt, Artificial Sequence
  source: /note="Description of Artificial Sequence: Synthetic oligonucleotide"
guucccauuacuggcccag

SEQ ID NO: 1477 - RNA, 19 nt, Artificial Sequence
  source: /note="Description of Artificial Sequence: Synthetic oligonucleotide"
ucugaguaagcaaucuggu

SEQ ID NO: 1478 - RNA, 19 nt, Artificial Sequence
  source: /note="Description of Artificial Sequence: Synthetic oligonucleotide"
cauuucaaaagcuagcccg

SEQ ID NO: 1479 - RNA, 19 nt, Artificial Sequence
  source: /note="Description of Artificial Sequence: Synthetic oligonucleotide"
accucugcauagacaucgc

SEQ ID NO: 1480 - RNA, 19 nt, Artificial Sequence
  source: /note="Description of Artificial Sequence: Synthetic oligonucleotide"
uucaaaagcuagcccgggg

SEQ ID NO: 1481 - RNA, 19 nt, Artificial Sequence
  source: /note="Description of Artificial Sequence: Synthetic oligonucleotide"
ccaaagaguggugauuuuc

SEQ ID NO: 1482 - RNA, 19 nt, Artificial Sequence
  source: /note="Description of Artificial Sequence: Synthetic oligonucleotide"
uggcgauaacucuucagug

SEQ ID NO: 1483 - RNA, 19 nt, Artificial Sequence
  source: /note="Description of Artificial Sequence: Synthetic oligonucleotide"
aaaauauacuucaucagau

SEQ ID NO: 1484 - RNA, 19 nt, Artificial Sequence
  source: /note="Description of Artificial Sequence: Synthetic oligonucleotide"
auagacaucgcauccugaa

SEQ ID NO: 1485 - RNA, 19 nt, Artificial Sequence
  source: /note="Description of Artificial Sequence: Synthetic oligonucleotide"
agggaaaucaggaccaggc

SEQ ID NO: 1486 - RNA, 19 nt, Artificial Sequence
  source: /note="Description of Artificial Sequence: Synthetic oligonucleotide"
acaccaugcuucaaguguu

SEQ ID NO: 1487 - RNA, 19 nt, Artificial Sequence
  source: /note="Description of Artificial Sequence: Synthetic oligonucleotide"
aaguuuagucaacuuccca

SEQ ID NO: 1488 - RNA, 19 nt, Artificial Sequence
  source: /note="Description of Artificial Sequence: Synthetic oligonucleotide"
caucgcauccugaaauuac

SEQ ID NO: 1489 - RNA, 19 nt, Artificial Sequence
  source: /note="Description of Artificial Sequence: Synthetic oligonucleotide"
ucaaguuuagucaacuucc

SEQ ID NO: 1490 - RNA, 19 nt, Artificial Sequence
  source: /note="Description of Artificial Sequence: Synthetic oligonucleotide"
caccaugcuucaaguguug

SEQ ID NO: 1491 - RNA, 19 nt, Artificial Sequence
  source: /note="Description of Artificial Sequence: Synthetic oligonucleotide"
aaacauuuuucaaguuuag

SEQ ID NO: 1492 - RNA, 19 nt, Artificial Sequence
  source: /note="Description of Artificial Sequence: Synthetic oligonucleotide"
ucgcaugugaggcucgaag

SEQ ID NO: 1493 - RNA, 19 nt, Artificial Sequence
  source: /note="Description of Artificial Sequence: Synthetic oligonucleotide"
aacucuucaguguuuccag

SEQ ID NO: 1494 - RNA, 19 nt, Artificial Sequence
  source: /note="Description of Artificial Sequence: Synthetic oligonucleotide"
cacugaaucacuuuucuuc

SEQ ID NO: 1495 - RNA, 19 nt, Artificial Sequence
  source: /note="Description of Artificial Sequence: Synthetic oligonucleotide"
gacauugaagcauugagac

SEQ ID NO: 1496 - RNA, 19 nt, Artificial Sequence
  source: /note="Description of Artificial Sequence: Synthetic oligonucleotide"
uccaaugcugucugagaag

SEQ ID NO: 1497 - RNA, 19 nt, Artificial Sequence
  source: /note="Description of Artificial Sequence: Synthetic oligonucleotide"
gaggggaauggcaaggauc

SEQ ID NO: 1498 - RNA, 19 nt, Artificial Sequence
  source: /note="Description of Artificial Sequence: Synthetic oligonucleotide"
auagauauuggguuuuaaa

SEQ ID NO: 1499 - RNA, 19 nt, Artificial Sequence
  source: /note="Description of Artificial Sequence: Synthetic oligonucleotide"
ucucaguucugaaacacca

SEQ ID NO: 1500 - RNA, 19 nt, Artificial Sequence
  source: /note="Description of Artificial Sequence: Synthetic oligonucleotide"
cugaaaucacugaaucacu

SEQ ID NO: 1501 - RNA, 19 nt, Artificial Sequence
  source: /note="Description of Artificial Sequence: Synthetic oligonucleotide"
aggaaauccaaugcugucu

SEQ ID NO: 1502 - RNA, 19 nt, Artificial Sequence
  source: /note="Description of Artificial Sequence: Synthetic oligonucleotide"
guccacugugguuaaaaug

SEQ ID NO: 1503 - RNA, 19 nt, Artificial Sequence
  source: /note="Description of Artificial Sequence: Synthetic oligonucleotide"
auauaacuuucguucugaa

SEQ ID NO: 1504 - RNA, 19 nt, Artificial Sequence
  source: /note="Description of Artificial Sequence: Synthetic oligonucleotide"
caggagaaagaacuauucc

SEQ ID NO: 1505 - RNA, 19 nt, Artificial Sequence
  source: /note="Description of Artificial Sequence: Synthetic oligonucleotide"
gaaguugguugcuuuaacu

SEQ ID NO: 1506 - RNA, 19 nt, Artificial Sequence
  source: /note="Description of Artificial Sequence: Synthetic oligonucleotide"
gucauuagcugaggggaau

SEQ ID NO: 1507 - RNA, 19 nt, Artificial Sequence
  source: /note="Description of Artificial Sequence: Synthetic oligonucleotide"
cuuuaacuuucuucucuag

SEQ ID NO: 1508 - RNA, 19 nt, Artificial Sequence
  source: /note="Description of Artificial Sequence: Synthetic oligonucleotide"
aaaaaauauacuucaucag

SEQ ID NO: 1509 - RNA, 19 nt, Artificial Sequence
  source: /note="Description of Artificial Sequence: Synthetic oligonucleotide"
aaaaaugugaaaaucacaa

SEQ ID NO: 1510 - RNA, 19 nt, Artificial Sequence
  source: /note="Description of Artificial Sequence: Synthetic oligonucleotide"
gucacacuggcgauaacuc

SEQ ID NO: 1511 - RNA, 19 nt, Artificial Sequence
  source: /note="Description of Artificial Sequence: Synthetic oligonucleotide"
ccaugcuucaaguguuguc

SEQ ID NO: 1512 - RNA, 19 nt, Artificial Sequence
  source: /note="Description of Artificial Sequence: Synthetic oligonucleotide"
aaauccaaugcugucugag

SEQ ID NO: 1513 - RNA, 19 nt, Artificial Sequence
  source: /note="Description of Artificial Sequence: Synthetic oligonucleotide"
uccuuuucccccuuuaaag

SEQ ID NO: 1514 - RNA, 19 nt, Artificial Sequence
  source: /note="Description of Artificial Sequence: Synthetic oligonucleotide"
gccagauccagaucuaugg

SEQ ID NO: 1515 - RNA, 19 nt, Artificial Sequence
  source: /note="Description of Artificial Sequence: Synthetic oligonucleotide"
ucagaauccugucuuguca

SEQ ID NO: 1516 - RNA, 19 nt, Artificial Sequence
  source: /note="Description of Artificial Sequence: Synthetic oligonucleotide"
cauugaagcauugagacac

SEQ ID NO: 1517 - RNA, 19 nt, Artificial Sequence
  source: /note="Description of Artificial Sequence: Synthetic oligonucleotide"
aagaacuauuccauaauca

SEQ ID NO: 1518 - RNA, 19 nt, Artificial Sequence
  source: /note="Description of Artificial Sequence: Synthetic oligonucleotide"
aucuaauauuccaggacau

SEQ ID NO: 1519 - RNA, 19 nt, Artificial Sequence
  source: /note="Description of Artificial Sequence: Synthetic oligonucleotide"
gugguuaaaaugcaucugg

SEQ ID NO: 1520 - RNA, 19 nt, Artificial Sequence
  source: /note="Description of Artificial Sequence: Synthetic oligonucleotide"
ucacuuuucuucuccucca

SEQ ID NO: 1521 - RNA, 19 nt, Artificial Sequence
  source: /note="Description of Artificial Sequence: Synthetic oligonucleotide"
agcaccuuuaggaaaucca

SEQ ID NO: 1522 - RNA, 19 nt, Artificial Sequence
  source: /note="Description of Artificial Sequence: Synthetic oligonucleotide"
uccauauaacuuucguucu

SEQ ID NO: 1523 - RNA, 19 nt, Artificial Sequence
  source: /note="Description of Artificial Sequence: Synthetic oligonucleotide"
ccauuucaaaagcuagccc

SEQ ID NO: 1524 - RNA, 19 nt, Artificial Sequence
  source: /note="Description of Artificial Sequence: Synthetic oligonucleotide"
aauuacaauauugggccug

SEQ ID NO: 1525 - RNA, 19 nt, Artificial Sequence
  source: /note="Description of Artificial Sequence: Synthetic oligonucleotide"
uggcaauaaaaaauauacu

SEQ ID NO: 1526 - RNA, 19 nt, Artificial Sequence
  source: /note="Description of Artificial Sequence: Synthetic oligonucleotide"
cacuuuucuucuccuccac

SEQ ID NO: 1527 - RNA, 19 nt, Artificial Sequence
  source: /note="Description of Artificial Sequence: Synthetic oligonucleotide"
gaguuuucagaauccuguc

SEQ ID NO: 1528 - RNA, 19 nt, Artificial Sequence
  source: /note="Description of Artificial Sequence: Synthetic oligonucleotide"
ucaaaguagcuuccauuua

SEQ ID NO: 1529 - RNA, 19 nt, Artificial Sequence
  source: /note="Description of Artificial Sequence: Synthetic oligonucleotide"
cacgucaccaauaagaagc

SEQ ID NO: 1530 - RNA, 19 nt, Artificial Sequence
  source: /note="Description of Artificial Sequence: Synthetic oligonucleotide"
gaacuauuccauaaucagu

SEQ ID NO: 1531 - RNA, 19 nt, Artificial Sequence
  source: /note="Description of Artificial Sequence: Synthetic oligonucleotide"
gccauuucaaaagcuagcc

SEQ ID NO: 1532 - RNA, 19 nt, Artificial Sequence
  source: /note="Description of Artificial Sequence: Synthetic oligonucleotide"
uccauuuauucacaguuuu

SEQ ID NO: 1533 - RNA, 19 nt, Artificial Sequence
  source: /note="Description of Artificial Sequence: Synthetic oligonucleotide"
ugccauuucaaaagcuagc

SEQ ID NO: 1534 - RNA, 19 nt, Artificial Sequence
  source: /note="Description of Artificial Sequence: Synthetic oligonucleotide"
aucacugaaucacuuuucu

SEQ ID NO: 1535 - RNA, 19 nt, Artificial Sequence
  source: /note="Description of Artificial Sequence: Synthetic oligonucleotide"
uaggaaauccaaugcuguc

SEQ ID NO: 1536 - RNA, 19 nt, Artificial Sequence
  source: /note="Description of Artificial Sequence: Synthetic oligonucleotide"
aacauuuuucaaguuuagu

SEQ ID NO: 1537 - RNA, 19 nt, Artificial Sequence
  source: /note="Description of Artificial Sequence: Synthetic oligonucleotide"
acugggacauugaagcauu

SEQ ID NO: 1538 - RNA, 19 nt, Artificial Sequence
  source: /note="Description of Artificial Sequence: Synthetic oligonucleotide"
uccuuuguguaggcugcac

SEQ ID NO: 1539 - RNA, 19 nt, Artificial Sequence
  source: /note="Description of Artificial Sequence: Synthetic oligonucleotide"
auuucaaaagcuagcccgg

SEQ ID NO: 1540 - RNA, 19 nt, Artificial Sequence
  source: /note="Description of Artificial Sequence: Synthetic oligonucleotide"
agucaaaguagcuuccauu

SEQ ID NO: 1541 - RNA, 19 nt, Artificial Sequence
  source: /note="Description of Artificial Sequence: Synthetic oligonucleotide"
aggggaauggcaaggaucc

SEQ ID NO: 1542 - RNA, 19 nt, Artificial Sequence
  source: /note="Description of Artificial Sequence: Synthetic oligonucleotide"
uccagaucuauggaaaauu

SEQ ID NO: 1543 - RNA, 19 nt, Artificial Sequence
  source: /note="Description of Artificial Sequence: Synthetic oligonucleotide"
ucaggaagcugguuaucca

SEQ ID NO: 1544 - RNA, 19 nt, Artificial Sequence
  source: /note="Description of Artificial Sequence: Synthetic oligonucleotide"
ccagcacaaaauacugccc

SEQ ID NO: 1545 - RNA, 19 nt, Artificial Sequence
  source: /note="Description of Artificial Sequence: Synthetic oligonucleotide"
uuccauuuauucacaguuu

SEQ ID NO: 1546 - RNA, 19 nt, Artificial Sequence
  source: /note="Description of Artificial Sequence: Synthetic oligonucleotide"
uaaccauguuucccuccug

SEQ ID NO: 1547 - RNA, 19 nt, Artificial Sequence
  source: /note="Description of Artificial Sequence: Synthetic oligonucleotide"
gcaucuaauauuccaggac

SEQ ID NO: 1548 - RNA, 19 nt, Artificial Sequence
  source: /note="Description of Artificial Sequence: Synthetic oligonucleotide"
aauccaaugcugucugaga

SEQ ID NO: 1549 - RNA, 19 nt, Artificial Sequence
  source: /note="Description of Artificial Sequence: Synthetic oligonucleotide"
ccugaaggucaccucaguc

SEQ ID NO: 1550 - RNA, 19 nt, Artificial Sequence
  source: /note="Description of Artificial Sequence: Synthetic oligonucleotide"
aaagaacuauuccauaauc

SEQ ID NO: 1551 - RNA, 19 nt, Artificial Sequence
  source: /note="Description of Artificial Sequence: Synthetic oligonucleotide"
aucacuuuucuucuccucc

SEQ ID NO: 1552 - RNA, 19 nt, Artificial Sequence
  source: /note="Description of Artificial Sequence: Synthetic oligonucleotide"
ccuccugagcaccuuuagg

SEQ ID NO: 1553 - RNA, 19 nt, Artificial Sequence
  source: /note="Description of Artificial Sequence: Synthetic oligonucleotide"
caucagaucuuagaguuau

SEQ ID NO: 1554 - RNA, 19 nt, Artificial Sequence
  source: /note="Description of Artificial Sequence: Synthetic oligonucleotide"
caaaguagcuuccauuuau

SEQ ID NO: 1555 - RNA, 19 nt, Artificial Sequence
  source: /note="Description of Artificial Sequence: Synthetic oligonucleotide"
acauugaagcauugagaca

SEQ ID NO: 1556 - RNA, 19 nt, Artificial Sequence
  source: /note="Description of Artificial Sequence: Synthetic oligonucleotide"
ccugguugaucacaagcca

SEQ ID NO: 1557 - RNA, 19 nt, Artificial Sequence
  source: /note="Description of Artificial Sequence: Synthetic oligonucleotide"
ggaguuuucagaauccugu

SEQ ID NO: 1558 - RNA, 19 nt, Artificial Sequence
  source: /note="Description of Artificial Sequence: Synthetic oligonucleotide"
auccaaugcugucugagaa

SEQ ID NO: 1559 - RNA, 19 nt, Artificial Sequence
  source: /note="Description of Artificial Sequence: Synthetic oligonucleotide"
ggccagauccagaucuaug

SEQ ID NO: 1560 - RNA, 19 nt, Artificial Sequence
  source: /note="Description of Artificial Sequence: Synthetic oligonucleotide"
cguucugaagggucacacu

SEQ ID NO: 1561 - RNA, 19 nt, Artificial Sequence
  source: /note="Description of Artificial Sequence: Synthetic oligonucleotide"
cgaaaaaugugaaaaucac

SEQ ID NO: 1562 - RNA, 19 nt, Artificial Sequence
  source: /note="Description of Artificial Sequence: Synthetic oligonucleotide"
acuggcgauaacucuucag

SEQ ID NO: 1563 - RNA, 19 nt, Artificial Sequence
  source: /note="Description of Artificial Sequence: Synthetic oligonucleotide"
aauggcaaggauccagggg

SEQ ID NO: 1564 - RNA, 19 nt, Artificial Sequence
  source: /note="Description of Artificial Sequence: Synthetic oligonucleotide"
gcaaucugguccuuggguc

SEQ ID NO: 1565 - RNA, 19 nt, Artificial Sequence
  source: /note="Description of Artificial Sequence: Synthetic oligonucleotide"
ugcauuuguggugggcguu

SEQ ID NO: 1566 - RNA, 19 nt, Artificial Sequence
  source: /note="Description of Artificial Sequence: Synthetic oligonucleotide"
ucgcauccugaaauuacaa

SEQ ID NO: 1567 - RNA, 19 nt, Artificial Sequence
  source: /note="Description of Artificial Sequence: Synthetic oligonucleotide"
ggaacuggagaaggagcac

SEQ ID NO: 1568 - RNA, 19 nt, Artificial Sequence
  source: /note="Description of Artificial Sequence: Synthetic oligonucleotide"
aagcaaucugguccuuggg

SEQ ID NO: 1569 - RNA, 19 nt, Artificial Sequence
  source: /note="Description of Artificial Sequence: Synthetic oligonucleotide"
cuucaaguguugucauuuu

SEQ ID NO: 1570 - RNA, 19 nt, Artificial Sequence
  source: /note="Description of Artificial Sequence: Synthetic oligonucleotide"
ccaaugcugucugagaagc

SEQ ID NO: 1571 - RNA, 19 nt, Artificial Sequence
  source: /note="Description of Artificial Sequence: Synthetic oligonucleotide"
gcugugacuucaggaagcu

SEQ ID NO: 1572 - RNA, 19 nt, Artificial Sequence
  source: /note="Description of Artificial Sequence: Synthetic oligonucleotide"
cuuccauuuauucacaguu

SEQ ID NO: 1573 - RNA, 19 nt, Artificial Sequence
  source: /note="Description of Artificial Sequence: Synthetic oligonucleotide"
ggucacacuggcgauaacu

SEQ ID NO: 1574 - RNA, 19 nt, Artificial Sequence
  source: /note="Description of Artificial Sequence: Synthetic oligonucleotide"
ccugaaauuacaauauugg

SEQ ID NO: 1575 - RNA, 19 nt, Artificial Sequence
  source: /note="Description of Artificial Sequence: Synthetic oligonucleotide"
aaggacaaaauggcaauaa

SEQ ID NO: 1576 - RNA, 19 nt, Artificial Sequence
  source: /note="Description of Artificial Sequence: Synthetic oligonucleotide"
ggaacaagucugcuauuug

SEQ ID NO: 1577 - RNA, 19 nt, Artificial Sequence
  source: /note="Description of Artificial Sequence: Synthetic oligonucleotide"
agcgacgccucagaaagga

SEQ ID NO: 1578 - RNA, 19 nt, Artificial Sequence
  source: /note="Description of Artificial Sequence: Synthetic oligonucleotide"
ccagauccagaucuaugga

SEQ ID NO: 1579 - RNA, 19 nt, Artificial Sequence
  source: /note="Description of Artificial Sequence: Synthetic oligonucleotide"
cccacuuugauggucccug

SEQ ID NO: 1580 - RNA, 19 nt, Artificial Sequence
  source: /note="Description of Artificial Sequence: Synthetic oligonucleotide"
ccacuuugauggucccugg

SEQ ID NO: 1581 - RNA, 19 nt, Artificial Sequence
  source: /note="Description of Artificial Sequence: Synthetic oligonucleotide"
acccacucuuccucuuucu

SEQ ID NO: 1582 - RNA, 19 nt, Artificial Sequence
  source: /note="Description of Artificial Sequence: Synthetic oligonucleotide"
acucuucaguguuuccagc

SEQ ID NO: 1583 - RNA, 19 nt, Artificial Sequence
  source: /note="Description of Artificial Sequence: Synthetic oligonucleotide"
uagucaaaguagcuuccau

SEQ ID NO: 1584 - RNA, 19 nt, Artificial Sequence
  source: /note="Description of Artificial Sequence: Synthetic oligonucleotide"
auccagaucuauggaaaau

SEQ ID NO: 1585 - RNA, 19 nt, Artificial Sequence
  source: /note="Description of Artificial Sequence: Synthetic oligonucleotide"
gucggaacaagucugcuau

SEQ ID NO: 1586 - RNA, 19 nt, Artificial Sequence
  source: /note="Description of Artificial Sequence: Synthetic oligonucleotide"
gaaaucaggaccaggcgag

SEQ ID NO: 1587 - RNA, 19 nt, Artificial Sequence
  source: /note="Description of Artificial Sequence: Synthetic oligonucleotide"
cuggcgauaacucuucagu

SEQ ID NO: 1588 - RNA, 19 nt, Artificial Sequence
  source: /note="Description of Artificial Sequence: Synthetic oligonucleotide"
ucccccuuuaaagguuuuc

SEQ ID NO: 1589 - RNA, 19 nt, Artificial Sequence
  source: /note="Description of Artificial Sequence: Synthetic oligonucleotide"
gcauagacaucgcauccug

SEQ ID NO: 1590 - RNA, 19 nt, Artificial Sequence
  source: /note="Description of Artificial Sequence: Synthetic oligonucleotide"
gaaaucacugaaucacuuu

SEQ ID NO: 1591 - RNA, 19 nt, Artificial Sequence
  source: /note="Description of Artificial Sequence: Synthetic oligonucleotide"
gcuuccauuuauucacagu

SEQ ID NO: 1592 - RNA, 19 nt, Artificial Sequence
  source: /note="Description of Artificial Sequence: Synthetic oligonucleotide"
ccuccugguugaucacaag

SEQ ID NO: 1593 - RNA, 19 nt, Artificial Sequence
  source: /note="Description of Artificial Sequence: Synthetic oligonucleotide"
gaaacaccaugcuucaagu

SEQ ID NO: 1594 - RNA, 19 nt, Artificial Sequence
  source: /note="Description of Artificial Sequence: Synthetic oligonucleotide"
acaauauugggccugaagu

SEQ ID NO: 1595 - RNA, 19 nt, Artificial Sequence
  source: /note="Description of Artificial Sequence: Synthetic oligonucleotide"
caggaagcugguuauccac

SEQ ID NO: 1596 - RNA, 19 nt, Artificial Sequence
  source: /note="Description of Artificial Sequence: Synthetic oligonucleotide"
gcuuccugaaggucaccuc

SEQ ID NO: 1597 - RNA, 19 nt, Artificial Sequence
  source: /note="Description of Artificial Sequence: Synthetic oligonucleotide"
ucacaguuuuaaaaacauu

SEQ ID NO: 1598 - RNA, 19 nt, Artificial Sequence
  source: /note="Description of Artificial Sequence: Synthetic oligonucleotide"
acaucgcauccugaaauua

SEQ ID NO: 1599 - RNA, 19 nt, Artificial Sequence
  source: /note="Description of Artificial Sequence: Synthetic oligonucleotide"
ugugaaaaucacaaauuua

SEQ ID NO: 1600 - RNA, 19 nt, Artificial Sequence
  source: /note="Description of Artificial Sequence: Synthetic oligonucleotide"
auuccauaaucaguuaaac

SEQ ID NO: 1601 - RNA, 19 nt, Artificial Sequence
  source: /note="Description of Artificial Sequence: Synthetic oligonucleotide"
cgacgccucagaaaggauc

SEQ ID NO: 1602 - RNA, 19 nt, Artificial Sequence
  source: /note="Description of Artificial Sequence: Synthetic oligonucleotide"
acaaaauacugcccaaaga

SEQ ID NO: 1603 - RNA, 19 nt, Artificial Sequence
  source: /note="Description of Artificial Sequence: Synthetic oligonucleotide"
cuuucguucugaaggguca

SEQ ID NO: 1604 - RNA, 19 nt, Artificial Sequence
  source: /note="Description of Artificial Sequence: Synthetic oligonucleotide"
aaaggacaaaauggcaaua

SEQ ID NO: 1605 - RNA, 19 nt, Artificial Sequence
  source: /note="Description of Artificial Sequence: Synthetic oligonucleotide"
ccuggguuuuccagcacaa

SEQ ID NO: 1606 - RNA, 19 nt, Artificial Sequence
  source: /note="Description of Artificial Sequence: Synthetic oligonucleotide"
acuauuccauaaucaguua

SEQ ID NO: 1607 - RNA, 19 nt, Artificial Sequence
  source: /note="Description of Artificial Sequence: Synthetic oligonucleotide"
gcaggagaaagaacuauuc

SEQ ID NO: 1608 - RNA, 19 nt, Artificial Sequence
  source: /note="Description of Artificial Sequence: Synthetic oligonucleotide"
aguaaccauguuucccucc

SEQ ID NO: 1609 - RNA, 19 nt, Artificial Sequence
  source: /note="Description of Artificial Sequence: Synthetic oligonucleotide"
uuucaaaagcuagcccggg

SEQ ID NO: 1610 - RNA, 19 nt, Artificial Sequence
  source: /note="Description of Artificial Sequence: Synthetic oligonucleotide"
aggagaaagaacuauucca

SEQ ID NO: 1611 - RNA, 19 nt, Artificial Sequence
  source: /note="Description of Artificial Sequence: Synthetic oligonucleotide"
caccuuuaggaaauccaau

SEQ ID NO: 1612 - RNA, 19 nt, Artificial Sequence
  source: /note="Description of Artificial Sequence: Synthetic oligonucleotide"
cauuuuucaaguuuaguca

SEQ ID NO: 1613 - RNA, 19 nt, Artificial Sequence
  source: /note="Description of Artificial Sequence: Synthetic oligonucleotide"
acugcauuuguggugggcg

SEQ ID NO: 1614 - RNA, 19 nt, Artificial Sequence
  source: /note="Description of Artificial Sequence: Synthetic oligonucleotide"
gcaggucagggaaaucagg

SEQ ID NO: 1615 - RNA, 19 nt, Artificial Sequence
  source: /note="Description of Artificial Sequence: Synthetic oligonucleotide"
ucugaaacaccaugcuuca

SEQ ID NO: 1616 - RNA, 19 nt, Artificial Sequence
  source: /note="Description of Artificial Sequence: Synthetic oligonucleotide"
gggucggaacaagucugcu

SEQ ID NO: 1617 - RNA, 19 nt, Artificial Sequence
  source: /note="Description of Artificial Sequence: Synthetic oligonucleotide"
uaaaaaagaagucaaaucc

SEQ ID NO: 1618 - RNA, 19 nt, Artificial Sequence
  source: /note="Description of Artificial Sequence: Synthetic oligonucleotide"
gcaucuggaacaagccauc

SEQ ID NO: 1619 - RNA, 19 nt, Artificial Sequence
  source: /note="Description of Artificial Sequence: Synthetic oligonucleotide"
ccauauaacuuucguucug

SEQ ID NO: 1620 - RNA, 19 nt, Artificial Sequence
  source: /note="Description of Artificial Sequence: Synthetic oligonucleotide"
agaaagaacuauuccauaa

SEQ ID NO: 1621 - RNA, 19 nt, Artificial Sequence
  source: /note="Description of Artificial Sequence: Synthetic oligonucleotide"
cucaguucugaaacaccau

SEQ ID NO: 1622 - RNA, 19 nt, Artificial Sequence
  source: /note="Description of Artificial Sequence: Synthetic oligonucleotide"
ggcaucuaauauuccagga

SEQ ID NO: 1623 - RNA, 19 nt, Artificial Sequence
  source: /note="Description of Artificial Sequence: Synthetic oligonucleotide"
gaguaagcaaucugguccu

SEQ ID NO: 1624 - RNA, 19 nt, Artificial Sequence
  source: /note="Description of Artificial Sequence: Synthetic oligonucleotide"
gagagucagggugucacca

SEQ ID NO: 1625 - RNA, 19 nt, Artificial Sequence
  source: /note="Description of Artificial Sequence: Synthetic oligonucleotide"
cuuaaaaaagaagucaaau

SEQ ID NO: 1626 - RNA, 19 nt, Artificial Sequence
  source: /note="Description of Artificial Sequence: Synthetic oligonucleotide"
uacaauauugggccugaag

SEQ ID NO: 1627 - RNA, 19 nt, Artificial Sequence
  source: /note="Description of Artificial Sequence: Synthetic oligonucleotide"
cuagucaaaguagcuucca

SEQ ID NO: 1628 - RNA, 19 nt, Artificial Sequence
  source: /note="Description of Artificial Sequence: Synthetic oligonucleotide"
gacuucaggaagcugguua

SEQ ID NO: 1629 - RNA, 19 nt, Artificial Sequence
  source: /note="Description of Artificial Sequence: Synthetic oligonucleotide"
cauuuuugagaacauuuuu

SEQ ID NO: 1630 - RNA, 19 nt, Artificial Sequence
  source: /note="Description of Artificial Sequence: Synthetic oligonucleotide"
ggucggaacaagucugcua

SEQ ID NO: 1631 - RNA, 19 nt, Artificial Sequence
  source: /note="Description of Artificial Sequence: Synthetic oligonucleotide"
cgucauuagcugaggggaa

SEQ ID NO: 1632 - RNA, 19 nt, Artificial Sequence
  source: /note="Description of Artificial Sequence: Synthetic oligonucleotide"
cagcacaaaauacugccca

SEQ ID NO: 1633 - RNA, 19 nt, Artificial Sequence
  source: /note="Description of Artificial Sequence: Synthetic oligonucleotide"
agcaaucugguccuugggu

SEQ ID NO: 1634 - RNA, 19 nt, Artificial Sequence
  source: /note="Description of Artificial Sequence: Synthetic oligonucleotide"
acuagucaaaguagcuucc

SEQ ID NO: 1635 - RNA, 19 nt, Artificial Sequence
  source: /note="Description of Artificial Sequence: Synthetic oligonucleotide"
cugaaauuacaauauuggg

SEQ ID NO: 1636 - RNA, 19 nt, Artificial Sequence
  source: /note="Description of Artificial Sequence: Synthetic oligonucleotide"
cacaaaauacugcccaaag

SEQ ID NO: 1637 - RNA, 19 nt, Artificial Sequence
  source: /note="Description of Artificial Sequence: Synthetic oligonucleotide"
gauauuggguuuuaaacaa

SEQ ID NO: 1638 - RNA, 19 nt, Artificial Sequence
  source: /note="Description of Artificial Sequence: Synthetic oligonucleotide"
cagggaaaucaggaccagg

SEQ ID NO: 1639 - RNA, 19 nt, Artificial Sequence
  source: /note="Description of Artificial Sequence: Synthetic oligonucleotide"
gguuaaaaugcaucuggaa

SEQ ID NO: 1640 - RNA, 19 nt, Artificial Sequence
  source: /note="Description of Artificial Sequence: Synthetic oligonucleotide"
gcuucaaguguugucauuu

SEQ ID NO: 1641 - RNA, 19 nt, Artificial Sequence
  source: /note="Description of Artificial Sequence: Synthetic oligonucleotide"
gcauuccagccauauuugg

SEQ ID NO: 1642 - RNA, 19 nt, Artificial Sequence
  source: /note="Description of Artificial Sequence: Synthetic oligonucleotide"
gggacauugaagcauugag

SEQ ID NO: 1643 - RNA, 19 nt, Artificial Sequence
  source: /note="Description of Artificial Sequence: Synthetic oligonucleotide"
gugacuucaggaagcuggu

SEQ ID NO: 1644 - RNA, 19 nt, Artificial Sequence
  source: /note="Description of Artificial Sequence: Synthetic oligonucleotide"
aaagaagucaaauccaagg

SEQ ID NO: 1645 - RNA, 19 nt, Artificial Sequence
  source: /note="Description of Artificial Sequence: Synthetic oligonucleotide"
cagauccagaucuauggaa

SEQ ID NO: 1646 - RNA, 19 nt, Artificial Sequence
  source: /note="Description of Artificial Sequence: Synthetic oligonucleotide"
caauauugggccugaaguu

SEQ ID NO: 1647 - RNA, 19 nt, Artificial Sequence
  source: /note="Description of Artificial Sequence: Synthetic oligonucleotide"
cacacuggcgauaacucuu

SEQ ID NO: 1648 - RNA, 19 nt, Artificial Sequence
  source: /note="Description of Artificial Sequence: Synthetic oligonucleotide"
cauagacaucgcauccuga

SEQ ID NO: 1649 - RNA, 19 nt, Artificial Sequence
  source: /note="Description of Artificial Sequence: Synthetic oligonucleotide"
ugguuaaaaugcaucugga

SEQ ID NO: 1650 - RNA, 19 nt, Artificial Sequence
  source: /note="Description of Artificial Sequence: Synthetic oligonucleotide"
uccugaaggucaccucagu

SEQ ID NO: 1651 - RNA, 19 nt, Artificial Sequence
  source: /note="Description of Artificial Sequence: Synthetic oligonucleotide"
uuaaaaaagaagucaaauc

SEQ ID NO: 1652 - RNA, 19 nt, Artificial Sequence
  source: /note="Description of Artificial Sequence: Synthetic oligonucleotide"
ucagggaaaucaggaccag

SEQ ID NO: 1653 - RNA, 19 nt, Artificial Sequence
  source: /note="Description of Artificial Sequence: Synthetic oligonucleotide"
ggcgauaacucuucagugu

SEQ ID NO: 1654 - RNA, 19 nt, Artificial Sequence
  source: /note="Description of Artificial Sequence: Synthetic oligonucleotide"
gcccaaagaguggugauuu

SEQ ID NO: 1655 - RNA, 19 nt, Artificial Sequence
  source: /note="Description of Artificial Sequence: Synthetic oligonucleotide"
acuuugauggucccugggu

SEQ ID NO: 1656 - RNA, 19 nt, Artificial Sequence
  source: /note="Description of Artificial Sequence: Synthetic oligonucleotide"
cacuuugauggucccuggg

SEQ ID NO: 1657 - RNA, 19 nt, Artificial Sequence
  source: /note="Description of Artificial Sequence: Synthetic oligonucleotide"
caugcuucaaguguuguca

SEQ ID NO: 1658 - RNA, 19 nt, Artificial Sequence
  source: /note="Description of Artificial Sequence: Synthetic oligonucleotide"
uccacgucaccaauaagaa

SEQ ID NO: 1659 - RNA, 19 nt, Artificial Sequence
  source: /note="Description of Artificial Sequence: Synthetic oligonucleotide"
gcaugugaggcucgaagug

SEQ ID NO: 1660 - RNA, 19 nt, Artificial Sequence
  source: /note="Description of Artificial Sequence: Synthetic oligonucleotide"
ccacgucaccaauaagaag

SEQ ID NO: 1661 - RNA, 19 nt, Artificial Sequence
  source: /note="Description of Artificial Sequence: Synthetic oligonucleotide"
ggagaaagaacuauuccau

SEQ ID NO: 1662 - RNA, 19 nt, Artificial Sequence
  source: /note="Description of Artificial Sequence: Synthetic oligonucleotide"
cccaaagaguggugauuuu

SEQ ID NO: 1663 - RNA, 19 nt, Artificial Sequence
  source: /note="Description of Artificial Sequence: Synthetic oligonucleotide"
aaaagaagucaaauccaag

SEQ ID NO: 1664 - RNA, 19 nt, Artificial Sequence
  source: /note="Description of Artificial Sequence: Synthetic oligonucleotide"
caucuaauauuccaggaca

SEQ ID NO: 1665 - RNA, 19 nt, Artificial Sequence
  source: /note="Description of Artificial Sequence: Synthetic oligonucleotide"
guaaccauguuucccuccu

SEQ ID NO: 1666 - RNA, 19 nt, Artificial Sequence
  source: /note="Description of Artificial Sequence: Synthetic oligonucleotide"
ggccugaaguugguugcuu

SEQ ID NO: 1667 - RNA, 19 nt, Artificial Sequence
  source: /note="Description of Artificial Sequence: Synthetic oligonucleotide"
gguuuuaaacaacugacau

SEQ ID NO: 1668 - RNA, 19 nt, Artificial Sequence
  source: /note="Description of Artificial Sequence: Synthetic oligonucleotide"
guuuuaaacaacugacaua

SEQ ID NO: 1669 - RNA, 19 nt, Artificial Sequence
  source: /note="Description of Artificial Sequence: Synthetic oligonucleotide"
gacaucgcauccugaaauu

SEQ ID NO: 1670 - RNA, 19 nt, Artificial Sequence
  source: /note="Description of Artificial Sequence: Synthetic oligonucleotide"
uuacaauauugggccugaa

SEQ ID NO: 1671 - RNA, 19 nt, Artificial Sequence
  source: /note="Description of Artificial Sequence: Synthetic oligonucleotide"
gaaauccaaugcugucuga

SEQ ID NO: 1672 - RNA, 19 nt, Artificial Sequence
  source: /note="Description of Artificial Sequence: Synthetic oligonucleotide"
aaacuagucaaaguagcuu

SEQ ID NO: 1673 - RNA, 19 nt, Artificial Sequence
  source: /note="Description of Artificial Sequence: Synthetic oligonucleotide"
cucccacuuugaugguccc

SEQ ID NO: 1674 - RNA, 19 nt, Artificial Sequence
  source: /note="Description of Artificial Sequence: Synthetic oligonucleotide"
acugagagucaggguguca

SEQ ID NO: 1675 - RNA, 19 nt, Artificial Sequence
  source: /note="Description of Artificial Sequence: Synthetic oligonucleotide"
uccugaaauuacaauauug

SEQ ID NO: 1676 - RNA, 19 nt, Artificial Sequence
  source: /note="Description of Artificial Sequence: Synthetic oligonucleotide"
gccugaaguugguugcuuu

SEQ ID NO: 1677 - RNA, 19 nt, Artificial Sequence
  source: /note="Description of Artificial Sequence: Synthetic oligonucleotide"
gcuggugucugaguaagca

SEQ ID NO: 1678 - RNA, 19 nt, Artificial Sequence
  source: /note="Description of Artificial Sequence: Synthetic oligonucleotide"
aaauuacaauauugggccu

SEQ ID NO: 1679 - RNA, 19 nt, Artificial Sequence
  source: /note="Description of Artificial Sequence: Synthetic oligonucleotide"
agucaaauccaaggaaaga

SEQ ID NO: 1680 - RNA, 19 nt, Artificial Sequence
  source: /note="Description of Artificial Sequence: Synthetic oligonucleotide"
gguucccauuacuggccca

SEQ ID NO: 1681 - RNA, 19 nt, Artificial Sequence
  source: /note="Description of Artificial Sequence: Synthetic oligonucleotide"
gggccugaaguugguugcu

SEQ ID NO: 1682 - RNA, 19 nt, Artificial Sequence
  source: /note="Description of Artificial Sequence: Synthetic oligonucleotide"
cccaagaauccuuaaaaaa

SEQ ID NO: 1683 - RNA, 19 nt, Artificial Sequence
  source: /note="Description of Artificial Sequence: Synthetic oligonucleotide"
aaaaaagaagucaaaucca

SEQ ID NO: 1684 - RNA, 19 nt, Artificial Sequence
  source: /note="Description of Artificial Sequence: Synthetic oligonucleotide"
ucccacuuugauggucccu

SEQ ID NO: 1685 - RNA, 19 nt, Artificial Sequence
  source: /note="Description of Artificial Sequence: Synthetic oligonucleotide"
cacugagagucaggguguc

SEQ ID NO: 1686 - RNA, 19 nt, Artificial Sequence
  source: /note="Description of Artificial Sequence: Synthetic oligonucleotide"
cugcauuuguggugggcgu

SEQ ID NO: 1687 - RNA, 19 nt, Artificial Sequence
  source: /note="Description of Artificial Sequence: Synthetic oligonucleotide"
acaaaauggcaauaaaaaa

SEQ ID NO: 1688 - RNA, 19 nt, Artificial Sequence
  source: /note="Description of Artificial Sequence: Synthetic oligonucleotide"
ccugagcaccuuuaggaaa

SEQ ID NO: 1689 - RNA, 19 nt, Artificial Sequence
  source: /note="Description of Artificial Sequence: Synthetic oligonucleotide"
cauuuauucacaguuuuaa

SEQ ID NO: 1690 - RNA, 19 nt, Artificial Sequence
  source: /note="Description of Artificial Sequence: Synthetic oligonucleotide"
gucaaauccaaggaaagau

SEQ ID NO: 1691 - RNA, 19 nt, Artificial Sequence
  source: /note="Description of Artificial Sequence: Synthetic oligonucleotide"
cugcccaaagaguggugau

SEQ ID NO: 1692 - RNA, 19 nt, Artificial Sequence
  source: /note="Description of Artificial Sequence: Synthetic oligonucleotide"
ggggaauggcaaggaucca

SEQ ID NO: 1693 - RNA, 19 nt, Artificial Sequence
  source: /note="Description of Artificial Sequence: Synthetic oligonucleotide"
cuuccugaaggucaccuca

SEQ ID NO: 1694 - RNA, 19 nt, Artificial Sequence
  source: /note="Description of Artificial Sequence: Synthetic oligonucleotide"
acgucaccaauaagaagcu

SEQ ID NO: 1695 - RNA, 19 nt, Artificial Sequence
  source: /note="Description of Artificial Sequence: Synthetic oligonucleotide"
gcacugagagucagggugu

SEQ ID NO: 1696 - RNA, 19 nt, Artificial Sequence
  source: /note="Description of Artificial Sequence: Synthetic oligonucleotide"
aaaaagaagucaaauccaa

SEQ ID NO: 1697 - RNA, 19 nt, Artificial Sequence
  source: /note="Description of Artificial Sequence: Synthetic oligonucleotide"
ggguuuuccagcacaaaau

SEQ ID NO: 1698 - RNA, 19 nt, Artificial Sequence
  source: /note="Description of Artificial Sequence: Synthetic oligonucleotide"
gcaauaaaaaauauacuuc

SEQ ID NO: 1699 - RNA, 19 nt, Artificial Sequence
  source: /note="Description of Artificial Sequence: Synthetic oligonucleotide"
ccuuuaaagguuuucagua

SEQ ID NO: 1700 - RNA, 19 nt, Artificial Sequence
  source: /note="Description of Artificial Sequence: Synthetic oligonucleotide"
ucggaacaagucugcuauu

SEQ ID NO: 1701 - RNA, 19 nt, Artificial Sequence
  source: /note="Description of Artificial Sequence: Synthetic oligonucleotide"
caaaauggcaauaaaaaau

SEQ ID NO: 1702 - RNA, 19 nt, Artificial Sequence
  source: /note="Description of Artificial Sequence: Synthetic oligonucleotide"
agcacaaaauacugcccaa

SEQ ID NO: 1703 - RNA, 19 nt, Artificial Sequence
  source: /note="Description of Artificial Sequence: Synthetic oligonucleotide"
ggacauugaagcauugaga

SEQ ID NO: 1704 - RNA, 19 nt, Artificial Sequence
  source: /note="Description of Artificial Sequence: Synthetic oligonucleotide"
gugaaaaucacaaauuuaa

SEQ ID NO: 1705 - RNA, 19 nt, Artificial Sequence
  source: /note="Description of Artificial Sequence: Synthetic oligonucleotide"
cauauaacuuucguucuga

SEQ ID NO: 1706 - RNA, 19 nt, Artificial Sequence
  source: /note="Description of Artificial Sequence: Synthetic oligonucleotide"
aggacaaaauggcaauaaa

SEQ ID NO: 1707 - RNA, 19 nt, Artificial Sequence
  source: /note="Description of Artificial Sequence: Synthetic oligonucleotide"
gcacaaaauacugcccaaa

SEQ ID NO: 1708 - RNA, 19 nt, Artificial Sequence
  source: /note="Description of Artificial Sequence: Synthetic oligonucleotide"
cacaguuuuaaaaacauuu

SEQ ID NO: 1709 - RNA, 19 nt, Artificial Sequence
  source: /note="Description of Artificial Sequence: Synthetic oligonucleotide"
cccuuuaaagguuuucagu

SEQ ID NO: 1710 - RNA, 19 nt, Artificial Sequence
  source: /note="Description of Artificial Sequence: Synthetic oligonucleotide"
cccuccugguugaucacaa

SEQ ID NO: 1711 - RNA, 19 nt, Artificial Sequence
  source: /note="Description of Artificial Sequence: Synthetic oligonucleotide"
cacaaauuuaaagaaaaug

SEQ ID NO: 1712 - RNA, 19 nt, Artificial Sequence
  source: /note="Description of Artificial Sequence: Synthetic oligonucleotide"
ccaagaauccuuaaaaaag

SEQ ID NO: 1713 - RNA, 19 nt, Artificial Sequence
  source: /note="Description of Artificial Sequence: Synthetic oligonucleotide"
gcauuuguggugggcguuu

SEQ ID NO: 1714 - RNA, 19 nt, Artificial Sequence
  source: /note="Description of Artificial Sequence: Synthetic oligonucleotide"
cggaacaagucugcuauuu

SEQ ID NO: 1715 - RNA, 19 nt, Artificial Sequence
  source: /note="Description of Artificial Sequence: Synthetic oligonucleotide"
cgucaccaauaagaagcuc

SEQ ID NO: 1716 - RNA, 19 nt, Artificial Sequence
  source: /note="Description of Artificial Sequence: Synthetic oligonucleotide"
uauggaaaauuaauaucug

SEQ ID NO: 1717 - RNA, 19 nt, Artificial Sequence
  source: /note="Description of Artificial Sequence: Synthetic oligonucleotide"
gcauccugaaauuacaaua

SEQ ID NO: 1718 - RNA, 19 nt, Artificial Sequence
  source: /note="Description of Artificial Sequence: Synthetic oligonucleotide"
gaaaaaugugaaaaucaca

SEQ ID NO: 1719 - RNA, 19 nt, Artificial Sequence
  source: /note="Description of Artificial Sequence: Synthetic oligonucleotide"
ccuuuucaguuccacguca

SEQ ID NO: 1720 - RNA, 19 nt, Artificial Sequence
  source: /note="Description of Artificial Sequence: Synthetic oligonucleotide"
cacccacucuuccucuuuc

SEQ ID NO: 1721 - RNA, 19 nt, Artificial Sequence
  source: /note="Description of Artificial Sequence: Synthetic oligonucleotide"
gaagucaaauccaaggaaa

SEQ ID NO: 1722 - RNA, 19 nt, Artificial Sequence
  source: /note="Description of Artificial Sequence: Synthetic oligonucleotide"
gacgccucagaaaggauca

SEQ ID NO: 1723 - RNA, 19 nt, Artificial Sequence
  source: /note="Description of Artificial Sequence: Synthetic oligonucleotide"
guuaccucugcauagacau

SEQ ID NO: 1724 - RNA, 19 nt, Artificial Sequence
  source: /note="Description of Artificial Sequence: Synthetic oligonucleotide"
auuacaauauugggccuga

SEQ ID NO: 1725 - RNA, 19 nt, Artificial Sequence
  source: /note="Description of Artificial Sequence: Synthetic oligonucleotide"
gaaaaucacaaauuuaaag

SEQ ID NO: 1726 - RNA, 19 nt, Artificial Sequence
  source: /note="Description of Artificial Sequence: Synthetic oligonucleotide"
gaauccuuaaaaaagaagu

SEQ ID NO: 1727 - RNA, 19 nt, Artificial Sequence
  source: /note="Description of Artificial Sequence: Synthetic oligonucleotide"
gucgcaugugaggcucgaa

SEQ ID NO: 1728 - RNA, 19 nt, Artificial Sequence
  source: /note="Description of Artificial Sequence: Synthetic oligonucleotide"
gauccagaucuauggaaaa

SEQ ID NO: 1729 - RNA, 19 nt, Artificial Sequence
  source: /note="Description of Artificial Sequence: Synthetic oligonucleotide"
gagaaagaacuauuccaua

SEQ ID NO: 1730 - RNA, 19 nt, Artificial Sequence
  source: /note="Description of Artificial Sequence: Synthetic oligonucleotide"
cccuuuucaguuccacguc

SEQ ID NO: 1731 - RNA, 19 nt, Artificial Sequence
  source: /note="Description of Artificial Sequence: Synthetic oligonucleotide"
agaucuauggaaaauuaau

SEQ ID NO: 1732 - RNA, 19 nt, Artificial Sequence
  source: /note="Description of Artificial Sequence: Synthetic oligonucleotide"
guccuuuguguaggcugca

SEQ ID NO: 1733 - RNA, 19 nt, Artificial Sequence
  source: /note="Description of Artificial Sequence: Synthetic oligonucleotide"
ccauguuucccuccugguu

SEQ ID NO: 1734 - RNA, 19 nt, Artificial Sequence
  source: /note="Description of Artificial Sequence: Synthetic oligonucleotide"
ccagaucuauggaaaauua

SEQ ID NO: 1735 - RNA, 19 nt, Artificial Sequence
  source: /note="Description of Artificial Sequence: Synthetic oligonucleotide"
ggguuuuaaacaacugaca

SEQ ID NO: 1736 - RNA, 19 nt, Artificial Sequence
  source: /note="Description of Artificial Sequence: Synthetic oligonucleotide"
cugaaacaccaugcuucaa

SEQ ID NO: 1737 - RNA, 19 nt, Artificial Sequence
  source: /note="Description of Artificial Sequence: Synthetic oligonucleotide"
ggaaaucaggaccaggcga

SEQ ID NO: 1738 - RNA, 19 nt, Artificial Sequence
  source: /note="Description of Artificial Sequence: Synthetic oligonucleotide"
ccauuuauucacaguuuua

SEQ ID NO: 1739 - RNA, 19 nt, Artificial Sequence
  source: /note="Description of Artificial Sequence: Synthetic oligonucleotide"
gcaccuuuaggaaauccaa

SEQ ID NO: 1740 - RNA, 19 nt, Artificial Sequence
  source: /note="Description of Artificial Sequence: Synthetic oligonucleotide"
ggcaauaaaaaauauacuu

SEQ ID NO: 1741 - RNA, 19 nt, Artificial Sequence
  source: /note="Description of Artificial Sequence: Synthetic oligonucleotide"
gaucuauggaaaauuaaua

SEQ ID NO: 1742 - RNA, 19 nt, Artificial Sequence
  source: /note="Description of Artificial Sequence: Synthetic oligonucleotide"
cauccugaaauuacaauau

SEQ ID NO: 1743 - RNA, 19 nt, Artificial Sequence
  source: /note="Description of Artificial Sequence: Synthetic oligonucleotide"
gcgacgccucagaaaggau

SEQ ID NO: 1744 - RNA, 19 nt, Artificial Sequence
  source: /note="Description of Artificial Sequence: Synthetic oligonucleotide"
gacaaaauggcaauaaaaa

SEQ ID NO: 1745 - RNA, 19 nt, Artificial Sequence
  source: /note="Description of Artificial Sequence: Synthetic oligonucleotide"
gcuuuaacuuucuucucua

SEQ ID NO: 1746 - RNA, 19 nt, Artificial Sequence
  source: /note="Description of Artificial Sequence: Synthetic oligonucleotide"
ccuuaaaaaagaagucaaa

SEQ ID NO: 1747 - RNA, 19 nt, Artificial Sequence
  source: /note="Description of Artificial Sequence: Synthetic oligonucleotide"
cacugcauuuguggugggc

SEQ ID NO: 1748 - RNA, 19 nt, Artificial Sequence
  source: /note="Description of Artificial Sequence: Synthetic oligonucleotide"
ccugaaguugguugcuuua

SEQ ID NO: 1749 - RNA, 19 nt, Artificial Sequence
  source: /note="Description of Artificial Sequence: Synthetic oligonucleotide"
cugaaguugguugcuuuaa

SEQ ID NO: 1750 - RNA, 19 nt, Artificial Sequence
  source: /note="Description of Artificial Sequence: Synthetic oligonucleotide"
gguccuugggucggaacaa

SEQ ID NO: 1751 - RNA, 19 nt, Artificial Sequence
  source: /note="Description of Artificial Sequence: Synthetic oligonucleotide"
cagaucuauggaaaauuaa

SEQ ID NO: 1752 - RNA, 19 nt, Artificial Sequence
  source: /note="Description of Artificial Sequence: Synthetic oligonucleotide"
gcgauaacucuucaguguu

SEQ ID NO: 1753 - RNA, 19 nt, Artificial Sequence
  source: /note="Description of Artificial Sequence: Synthetic oligonucleotide"
aauccuuaaaaaagaaguc

SEQ ID NO: 1754 - RNA, 19 nt, Artificial Sequence
  source: /note="Description of Artificial Sequence: Synthetic oligonucleotide"
auccuuaaaaaagaaguca

SEQ ID NO: 1755 - RNA, 19 nt, Artificial Sequence
  source: /note="Description of Artificial Sequence: Synthetic oligonucleotide"
uccuuaaaaaagaagucaa

SEQ ID NO: 1756 - RNA, 19 nt, Artificial Sequence
  source: /note="Description of Artificial Sequence: Synthetic oligonucleotide"
cgauaacucuucaguguuu

SEQ ID NO: 1757 - RNA, 19 nt, Artificial Sequence
  source: /note="Description of Artificial Sequence: Synthetic oligonucleotide"
gaaagaacuauuccauaau

SEQ ID NO: 1758 - RNA, 19 nt, Artificial Sequence
  source: /note="Description of Artificial Sequence: Synthetic oligonucleotide"
aucccaagaauccuuaaaa

SEQ ID NO: 1759 - RNA, 19 nt, Artificial Sequence
  source: /note="Description of Artificial Sequence: Synthetic oligonucleotide"
caagaauccuuaaaaaaga

SEQ ID NO: 1760 - RNA, 19 nt, Artificial Sequence
  source: /note="Description of Artificial Sequence: Synthetic oligonucleotide"
ucccaagaauccuuaaaaa

SEQ ID NO: 1761 - RNA, 19 nt, Artificial Sequence
  source: /note="Description of Artificial Sequence: Synthetic oligonucleotide"
gguccacugugguuaaaau

SEQ ID NO: 1762 - RNA, 19 nt, Artificial Sequence
  source: /note="Description of Artificial Sequence: Synthetic oligonucleotide"
ggacaaaauggcaauaaaa

SEQ ID NO: 1763 - DNA, 21 bp, Artificial Sequence
  source: /note="Description of Artificial Sequence: Synthetic oligonucleotide"
  source: /note="Description of Combined DNA/RNA Molecule: Synthetic oligonucleotide"
ggauuugacuucuuuuuuatt

SEQ ID NO: 1764 - DNA, 21 bp, Artificial Sequence
  source: /note="Description of Artificial Sequence: Synthetic oligonucleotide"
  source: /note="Description of Combined DNA/RNA Molecule: Synthetic oligonucleotide"
auuugacuucuuuuuuaagtt

SEQ ID NO: 1765 - DNA, 21 bp, Artificial Sequence
  source: /note="Description of Artificial Sequence: Synthetic oligonucleotide"
  source: /note="Description of Combined DNA/RNA Molecule: Synthetic oligonucleotide"
ccuuggauuugacuucuuutt

SEQ ID NO: 1766 - DNA, 21 bp, Artificial Sequence
  source: /note="Description of Artificial Sequence: Synthetic oligonucleotide"
  source: /note="Description of Combined DNA/RNA Molecule: Synthetic oligonucleotide"
gauuugacuucuuuuuuaatt

SEQ ID NO: 1767 - DNA, 21 bp, Artificial Sequence
  source: /note="Description of Artificial Sequence: Synthetic oligonucleotide"
  source: /note="Description of Combined DNA/RNA Molecule: Synthetic oligonucleotide"
cuuggauuugacuucuuuutt

SEQ ID NO: 1768 - DNA, 21 bp, Artificial Sequence
  source: /note="Description of Artificial Sequence: Synthetic oligonucleotide"
  source: /note="Description of Combined DNA/RNA Molecule: Synthetic oligonucleotide"
ucuuuccuuggauuugacutt

SEQ ID NO: 1769 - DNA, 21 bp, Artificial Sequence
  source: /note="Description of Artificial Sequence: Synthetic oligonucleotide"
  source: /note="Description of Combined DNA/RNA Molecule: Synthetic oligonucleotide"
uuuuuuaaggauucuugggtt

SEQ ID NO: 1770 - DNA, 21 bp, Artificial Sequence
  source: /note="Description of Artificial Sequence: Synthetic oligonucleotide"
  source: /note="Description of Combined DNA/RNA Molecule: Synthetic oligonucleotide"
uggauuugacuucuuuuuutt

SEQ ID NO: 1771 - DNA, 21 bp, Artificial Sequence
  source: /note="Description of Artificial Sequence: Synthetic oligonucleotide"
  source: /note="Description of Combined DNA/RNA Molecule: Synthetic oligonucleotide"
aucuuuccuuggauuugactt

SEQ ID NO: 1772 - DNA, 21 bp, Artificial Sequence
  source: /note="Description of Artificial Sequence: Synthetic oligonucleotide"
  source: /note="Description of Combined DNA/RNA Molecule: Synthetic oligonucleotide"
uuggauuugacuucuuuuutt

SEQ ID NO: 1773 - DNA, 21 bp, Artificial Sequence
  source: /note="Description of Artificial Sequence: Synthetic oligonucleotide"
  source: /note="Description of Combined DNA/RNA Molecule: Synthetic oligonucleotide"
cuuuuuuaaggauucuuggtt

SEQ ID NO: 1774 - DNA, 21 bp, Artificial Sequence
  source: /note="Description of Artificial Sequence: Synthetic oligonucleotide"
  source: /note="Description of Combined DNA/RNA Molecule: Synthetic oligonucleotide"
uuuccuuggauuugacuuctt

SEQ ID NO: 1775 - DNA, 21 bp, Artificial Sequence
  source: /note="Description of Artificial Sequence: Synthetic oligonucleotide"
  source: /note="Description of Combined DNA/RNA Molecule: Synthetic oligonucleotide"
acuucuuuuuuaaggauuctt

SEQ ID NO: 1776 - DNA, 21 bp, Artificial Sequence
  source: /note="Description of Artificial Sequence: Synthetic oligonucleotide"
  source: /note="Description of Combined DNA/RNA Molecule: Synthetic oligonucleotide"
uuugacuucuuuuuuaaggtt

SEQ ID NO: 1777 - DNA, 21 bp, Artificial Sequence
  source: /note="Description of Artificial Sequence: Synthetic oligonucleotide"
  source: /note="Description of Combined DNA/RNA Molecule: Synthetic oligonucleotide"
gacuucuuuuuuaaggauutt

SEQ ID NO: 1778 - DNA, 21 bp, Artificial Sequence
  source: /note="Description of Artificial Sequence: Synthetic oligonucleotide"
  source: /note="Description of Combined DNA/RNA Molecule: Synthetic oligonucleotide"
ugacuucuuuuuuaaggautt

SEQ ID NO: 1779 - DNA, 21 bp, Artificial Sequence
  source: /note="Description of Artificial Sequence: Synthetic oligonucleotide"
  source: /note="Description of Combined DNA/RNA Molecule: Synthetic oligonucleotide"
uugacuucuuuuuuaaggatt

SEQ ID NO: 1780 - DNA, 21 bp, Artificial Sequence
  source: /note="Description of Artificial Sequence: Synthetic oligonucleotide"
  source: /note="Description of Combined DNA/RNA Molecule: Synthetic oligonucleotide"
uuuuaaggauucuugggautt

SEQ ID NO: 1781 - DNA, 21 bp, Artificial Sequence
  source: /note="Description of Artificial Sequence: Synthetic oligonucleotide"
  source: /note="Description of Combined DNA/RNA Molecule: Synthetic oligonucleotide"
ucuuuuuuaaggauucuugtt

SEQ ID NO: 1782 - DNA, 21 bp, Artificial Sequence
  source: /note="Description of Artificial Sequence: Synthetic oligonucleotide"
  source: /note="Description of Combined DNA/RNA Molecule: Synthetic oligonucleotide"
uuuuuaaggauucuugggatt

SEQ ID NO: 1783 - DNA, 21 bp, Artificial Sequence
  source: /note="Description of Artificial Sequence: Synthetic oligonucleotide"
  source: /note="Description of Combined DNA/RNA Molecule: Synthetic oligonucleotide"
uaaaaaagaagucaaaucctt

SEQ ID NO: 1784 - DNA, 21 bp, Artificial Sequence
  source: /note="Description of Artificial Sequence: Synthetic oligonucleotide"
  source: /note="Description of Combined DNA/RNA Molecule: Synthetic oligonucleotide"
cuuaaaaaagaagucaaautt

SEQ ID NO: 1785 - DNA, 21 bp, Artificial Sequence
  source: /note="Description of Artificial Sequence: Synthetic oligonucleotide"
  source: /note="Description of Combined DNA/RNA Molecule: Synthetic oligonucleotide"
aaagaagucaaauccaaggtt

SEQ ID NO: 1786 - DNA, 21 bp, Artificial Sequence
  source: /note="Description of Artificial Sequence: Synthetic oligonucleotide"
  source: /note="Description of Combined DNA/RNA Molecule: Synthetic oligonucleotide"
uuaaaaaagaagucaaauctt

SEQ ID NO: 1787 - DNA, 21 bp, Artificial Sequence
  source: /note="Description of Artificial Sequence: Synthetic oligonucleotide"
  source: /note="Description of Combined DNA/RNA Molecule: Synthetic oligonucleotide"
aaaagaagucaaauccaagtt

SEQ ID NO: 1788 - DNA, 21 bp, Artificial Sequence
  source: /note="Description of Artificial Sequence: Synthetic oligonucleotide"
  source: /note="Description of Combined DNA/RNA Molecule: Synthetic oligonucleotide"
agucaaauccaaggaaagatt

SEQ ID NO: 1789 - DNA, 21 bp, Artificial Sequence
  source: /note="Description of Artificial Sequence: Synthetic oligonucleotide"
  source: /note="Description of Combined DNA/RNA Molecule: Synthetic oligonucleotide"
cccaagaauccuuaaaaaatt

SEQ ID NO: 1790 - DNA, 21 bp, Artificial Sequence
  source: /note="Description of Artificial Sequence: Synthetic oligonucleotide"
  source: /note="Description of Combined DNA/RNA Molecule: Synthetic oligonucleotide"
aaaaaagaagucaaauccatt

SEQ ID NO: 1791 - DNA, 21 bp, Artificial Sequence
  source: /note="Description of Artificial Sequence: Synthetic oligonucleotide"
  source: /note="Description of Combined DNA/RNA Molecule: Synthetic oligonucleotide"
gucaaauccaaggaaagautt

SEQ ID NO: 1792 - DNA, 21 bp, Artificial Sequence
  source: /note="Description of Artificial Sequence: Synthetic oligonucleotide"
  source: /note="Description of Combined DNA/RNA Molecule: Synthetic oligonucleotide"
aaaaagaagucaaauccaatt

SEQ ID NO: 1793 - DNA, 21 bp, Artificial Sequence
  source: /note="Description of Artificial Sequence: Synthetic oligonucleotide"
  source: /note="Description of Combined DNA/RNA Molecule: Synthetic oligonucleotide"
ccaagaauccuuaaaaaagtt

SEQ ID NO: 1794 - DNA, 21 bp, Artificial Sequence
  source: /note="Description of Artificial Sequence: Synthetic oligonucleotide"
  source: /note="Description of Combined DNA/RNA Molecule: Synthetic oligonucleotide"
gaagucaaauccaaggaaatt

SEQ ID NO: 1795 - DNA, 21 bp, Artificial Sequence
  source: /note="Description of Artificial Sequence: Synthetic oligonucleotide"
  source: /note="Description of Combined DNA/RNA Molecule: Synthetic oligonucleotide"
gaauccuuaaaaaagaagutt

SEQ ID NO: 1796 - DNA, 21 bp, Artificial Sequence
  source: /note="Description of Artificial Sequence: Synthetic oligonucleotide"
  source: /note="Description of Combined DNA/RNA Molecule: Synthetic oligonucleotide"
ccuuaaaaaagaagucaaatt

SEQ ID NO: 1797 - DNA, 21 bp, Artificial Sequence
  source: /note="Description of Artificial Sequence: Synthetic oligonucleotide"
  source: /note="Description of Combined DNA/RNA Molecule: Synthetic oligonucleotide"
aauccuuaaaaaagaaguctt

SEQ ID NO: 1798 - DNA, 21 bp, Artificial Sequence
  source: /note="Description of Artificial Sequence: Synthetic oligonucleotide"
  source: /note="Description of Combined DNA/RNA Molecule: Synthetic oligonucleotide"
auccuuaaaaaagaagucatt

SEQ ID NO: 1799 - DNA, 21 bp, Artificial Sequence
  source: /note="Description of Artificial Sequence: Synthetic oligonucleotide"
  source: /note="Description of Combined DNA/RNA Molecule: Synthetic oligonucleotide"
uccuuaaaaaagaagucaatt

SEQ ID NO: 1800 - DNA, 21 bp, Artificial Sequence
  source: /note="Description of Artificial Sequence: Synthetic oligonucleotide"
  source: /note="Description of Combined DNA/RNA Molecule: Synthetic oligonucleotide"
aucccaagaauccuuaaaatt

SEQ ID NO: 1801 - DNA, 21 bp, Artificial Sequence
  source: /note="Description of Artificial Sequence: Synthetic oligonucleotide"
  source: /note="Description of Combined DNA/RNA Molecule: Synthetic oligonucleotide"
caagaauccuuaaaaaagatt

SEQ ID NO: 1802 - DNA, 21 bp, Artificial Sequence
  source: /note="Description of Artificial Sequence: Synthetic oligonucleotide"
  source: /note="Description of Combined DNA/RNA Molecule: Synthetic oligonucleotide"
ucccaagaauccuuaaaaatt

SEQ ID NO: 1803 - RNA, 19 nt, Homo sapiens
ggauuugacuucuuuuuua

SEQ ID NO: 1804 - RNA, 19 nt, Homo sapiens
auuugacuucuuuuuuaag

SEQ ID NO: 1805 - RNA, 19 nt, Homo sapiens
ccuuggauuugacuucuuu

SEQ ID NO: 1806 - RNA, 19 nt, Homo sapiens
gauuugacuucuuuuuuaa

SEQ ID NO: 1807 - RNA, 19 nt, Homo sapiens
cuuggauuugacuucuuuu

SEQ ID NO: 1808 - RNA, 19 nt, Homo sapiens
ucuuuccuuggauuugacu

SEQ ID NO: 1809 - RNA, 19 nt, Homo sapiens
uuuuuuaaggauucuuggg

SEQ ID NO: 1810 - RNA, 19 nt, Homo sapiens
uggauuugacuucuuuuuu

SEQ ID NO: 1811 - RNA, 19 nt, Homo sapiens
aucuuuccuuggauuugac

SEQ ID NO: 1812 - RNA, 19 nt, Homo sapiens
uuggauuugacuucuuuuu

SEQ ID NO: 1813 - RNA, 19 nt, Homo sapiens
cuuuuuuaaggauucuugg

SEQ ID NO: 1814 - RNA, 19 nt, Homo sapiens
uuuccuuggauuugacuuc

SEQ ID NO: 1815 - RNA, 19 nt, Homo sapiens
acuucuuuuuuaaggauuc

SEQ ID NO: 1816 - RNA, 19 nt, Homo sapiens
uuugacuucuuuuuuaagg

SEQ ID NO: 1817 - RNA, 19 nt, Homo sapiens
gacuucuuuuuuaaggauu

SEQ ID NO: 1818 - RNA, 19 nt, Homo sapiens
ugacuucuuuuuuaaggau

SEQ ID NO: 1819 - RNA, 19 nt, Homo sapiens
uugacuucuuuuuuaagga

SEQ ID NO: 1820 - RNA, 19 nt, Homo sapiens
uuuuaaggauucuugggau

SEQ ID NO: 1821 - RNA, 19 nt, Homo sapiens
ucuuuuuuaaggauucuug

SEQ ID NO: 1822 - RNA, 19 nt, Homo sapiens
uuuuuaaggauucuuggga

SEQ ID NO: 1823 - RNA, 19 nt, Artificial Sequence
  source: /note="Description of Artificial Sequence: Synthetic oligonucleotide"
ggauuugacuucuuuuuua

SEQ ID NO: 1824 - RNA, 19 nt, Artificial Sequence
  source: /note="Description of Artificial Sequence: Synthetic oligonucleotide"
auuugacuucuuuuuuaag

SEQ ID NO: 1825 - RNA, 19 nt, Artificial Sequence
  source: /note="Description of Artificial Sequence: Synthetic oligonucleotide"
ccuuggauuugacuucuuu

SEQ ID NO: 1826 - RNA, 19 nt, Artificial Sequence
  source: /note="Description of Artificial Sequence: Synthetic oligonucleotide"
gauuugacuucuuuuuuaa

SEQ ID NO: 1827 - RNA, 19 nt, Artificial Sequence
  source: /note="Description of Artificial Sequence: Synthetic oligonucleotide"
cuuggauuugacuucuuuu

SEQ ID NO: 1828 - RNA, 19 nt, Artificial Sequence
  source: /note="Description of Artificial Sequence: Synthetic oligonucleotide"
ucuuuccuuggauuugacu

SEQ ID NO: 1829 - RNA, 19 nt, Artificial Sequence
  source: /note="Description of Artificial Sequence: Synthetic oligonucleotide"
uuuuuuaaggauucuuggg

SEQ ID NO: 1830 - RNA, 19 nt, Artificial Sequence
  source: /note="Description of Artificial Sequence: Synthetic oligonucleotide"
uggauuugacuucuuuuuu

SEQ ID NO: 1831 - RNA, 19 nt, Artificial Sequence
  source: /note="Description of Artificial Sequence: Synthetic oligonucleotide"
aucuuuccuuggauuugac

SEQ ID NO: 1832 - RNA, 19 nt, Artificial Sequence
  source: /note="Description of Artificial Sequence: Synthetic oligonucleotide"
uuggauuugacuucuuuuu

SEQ ID NO: 1833 - RNA, 19 nt, Artificial Sequence
  source: /note="Description of Artificial Sequence: Synthetic oligonucleotide"
cuuuuuuaaggauucuugg

SEQ ID NO: 1834 - RNA, 19 nt, Artificial Sequence
  source: /note="Description of Artificial Sequence: Synthetic oligonucleotide"
uuuccuuggauuugacuuc

SEQ ID NO: 1835 - RNA, 19 nt, Artificial Sequence
  source: /note="Description of Artificial Sequence: Synthetic oligonucleotide"
acuucuuuuuuaaggauuc

SEQ ID NO: 1836 - RNA, 19 nt, Artificial Sequence
  source: /note="Description of Artificial Sequence: Synthetic oligonucleotide"
uuugacuucuuuuuuaagg

SEQ ID NO: 1837 - RNA, 19 nt, Artificial Sequence
  source: /note="Description of Artificial Sequence: Synthetic oligonucleotide"
gacuucuuuuuuaaggauu

SEQ ID NO: 1838 - RNA, 19 nt, Artificial Sequence
  source: /note="Description of Artificial Sequence: Synthetic oligonucleotide"
ugacuucuuuuuuaaggau

SEQ ID NO: 1839 - RNA, 19 nt, Artificial Sequence
  source: /note="Description of Artificial Sequence: Synthetic oligonucleotide"
uugacuucuuuuuuaagga

SEQ ID NO: 1840 - RNA, 19 nt, Artificial Sequence
  source: /note="Description of Artificial Sequence: Synthetic oligonucleotide"
uuuuaaggauucuugggau

SEQ ID NO: 1841 - RNA, 19 nt, Artificial Sequence
  source: /note="Description of Artificial Sequence: Synthetic oligonucleotide"
ucuuuuuuaaggauucuug

SEQ ID NO: 1842 - RNA, 19 nt, Artificial Sequence
  source: /note="Description of Artificial Sequence: Synthetic oligonucleotide"
uuuuuaaggauucuuggga

SEQ ID NO: 1843 - RNA, 19 nt, Artificial Sequence
  source: /note="Description of Artificial Sequence: Synthetic oligonucleotide"
uaaaaaagaagucaaaucc

SEQ ID NO: 1844 - RNA, 19 nt, Artificial Sequence
  source: /note="Description of Artificial Sequence: Synthetic oligonucleotide"
cuuaaaaaagaagucaaau

SEQ ID NO: 1845 - RNA, 19 nt, Artificial Sequence
  source: /note="Description of Artificial Sequence: Synthetic oligonucleotide"
aaagaagucaaauccaagg

SEQ ID NO: 1846 - RNA, 19 nt, Artificial Sequence
  source: /note="Description of Artificial Sequence: Synthetic oligonucleotide"
uuaaaaaagaagucaaauc

SEQ ID NO: 1847 - RNA, 19 nt, Artificial Sequence
  source: /note="Description of Artificial Sequence: Synthetic oligonucleotide"
aaaagaagucaaauccaag

SEQ ID NO: 1848 - RNA, 19 nt, Artificial Sequence
  source: /note="Description of Artificial Sequence: Synthetic oligonucleotide"
agucaaauccaaggaaaga

SEQ ID NO: 1849 - RNA, 19 nt, Artificial Sequence
  source: /note="Description of Artificial Sequence: Synthetic oligonucleotide"
cccaagaauccuuaaaaaa

SEQ ID NO: 1850 - RNA, 19 nt, Artificial Sequence
  source: /note="Description of Artificial Sequence: Synthetic oligonucleotide"
aaaaaagaagucaaaucca

SEQ ID NO: 1851 - RNA, 19 nt, Artificial Sequence
  source: /note="Description of Artificial Sequence: Synthetic oligonucleotide"
gucaaauccaaggaaagau

SEQ ID NO: 1852 - RNA, 19 nt, Artificial Sequence
  source: /note="Description of Artificial Sequence: Synthetic oligonucleotide"
aaaaagaagucaaauccaa

SEQ ID NO: 1853 - RNA, 19 nt, Artificial Sequence
  source: /note="Description of Artificial Sequence: Synthetic oligonucleotide"
ccaagaauccuuaaaaaag

SEQ ID NO: 1854 - RNA, 19 nt, Artificial Sequence
  source: /note="Description of Artificial Sequence: Synthetic oligonucleotide"
gaagucaaauccaaggaaa

SEQ ID NO: 1855 - RNA, 19 nt, Artificial Sequence
  source: /note="Description of Artificial Sequence: Synthetic oligonucleotide"
gaauccuuaaaaaagaagu

SEQ ID NO: 1856 - RNA, 19 nt, Artificial Sequence
  source: /note="Description of Artificial Sequence: Synthetic oligonucleotide"
ccuuaaaaaagaagucaaa

SEQ ID NO: 1857 - RNA, 19 nt, Artificial Sequence
  source: /note="Description of Artificial Sequence: Synthetic oligonucleotide"
aauccuuaaaaaagaaguc

SEQ ID NO: 1858 - RNA, 19 nt, Artificial Sequence
  source: /note="Description of Artificial Sequence: Synthetic oligonucleotide"
auccuuaaaaaagaaguca

SEQ ID NO: 1859 - RNA, 19 nt, Artificial Sequence
  source: /note="Description of Artificial Sequence: Synthetic oligonucleotide"
uccuuaaaaaagaagucaa

SEQ ID NO: 1860 - RNA, 19 nt, Artificial Sequence
  source: /note="Description of Artificial Sequence: Synthetic oligonucleotide"
aucccaagaauccuuaaaa

SEQ ID NO: 1861 - RNA, 19 nt, Artificial Sequence
  source: /note="Description of Artificial Sequence: Synthetic oligonucleotide"
caagaauccuuaaaaaaga

SEQ ID NO: 1862 - RNA, 19 nt, Artificial Sequence
  source: /note="Description of Artificial Sequence: Synthetic oligonucleotide"
ucccaagaauccuuaaaaa

SEQ ID NO: 1863 - RNA, 21 nt, Artificial Sequence
  source: /note="Description of Artificial Sequence: Synthetic oligonucleotide"
ccagaagaauguuccagaauu

SEQ ID NO: 1864 - RNA, 21 nt, Artificial Sequence
  source: /note="Description of Artificial Sequence: Synthetic oligonucleotide"
ucagaugcaaguccauucuuu

SEQ ID NO: 1865 - RNA, 21 nt, Artificial Sequence
  source: /note="Description of Artificial Sequence: Synthetic oligonucleotide"
cagaugcaaguccauucuugu

SEQ ID NO: 1866 - RNA, 21 nt, Artificial Sequence
  source: /note="Description of Artificial Sequence: Synthetic oligonucleotide"
ucucccuagccuucuuuuggu

SEQ ID NO: 1867 - RNA, 21 nt, Artificial Sequence
  source: /note="Description of Artificial Sequence: Synthetic oligonucleotide"
agccuucuuuugggaaagagu

SEQ ID NO: 1868 - RNA, 21 nt, Artificial Sequence
  source: /note="Description of Artificial Sequence: Synthetic oligonucleotide"
gaauuaaauacucucccaagu

SEQ ID NO: 1869 - RNA, 21 nt, Artificial Sequence
  source: /note="Description of Artificial Sequence: Synthetic oligonucleotide"
aggauucuuggaacgagguuu

SEQ ID NO: 1870 - RNA, 21 nt, Artificial Sequence
  source: /note="Description of Artificial Sequence: Synthetic oligonucleotide"
uuggaacgagguucucauugu

SEQ ID NO: 1871 - RNA, 21 nt, Artificial Sequence
  source: /note="Description of Artificial Sequence: Synthetic oligonucleotide"
aucucccuagccuucuuuugu

SEQ ID NO: 1872 - RNA, 21 nt, Artificial Sequence
  source: /note="Description of Artificial Sequence: Synthetic oligonucleotide"
cccuagccuucuuuugggaau

SEQ ID NO: 1873 - RNA, 21 nt, Artificial Sequence
  source: /note="Description of Artificial Sequence: Synthetic oligonucleotide"
cuagccuucuuuugggaaagu

SEQ ID NO: 1874 - RNA, 21 nt, Artificial Sequence
  source: /note="Description of Artificial Sequence: Synthetic oligonucleotide"
cagaagaauguuccagaaugu

SEQ ID NO: 1875 - RNA, 21 nt, Artificial Sequence
  source: /note="Description of Artificial Sequence: Synthetic oligonucleotide"
ggaauuaaauacucucccaau

SEQ ID NO: 1876 - RNA, 21 nt, Artificial Sequence
  source: /note="Description of Artificial Sequence: Synthetic oligonucleotide"
aauuaaauacucucccaaguu

SEQ ID NO: 1877 - RNA, 21 nt, Artificial Sequence
  source: /note="Description of Artificial Sequence: Synthetic oligonucleotide"
gaugcaaguccauucuugguu

SEQ ID NO: 1878 - RNA, 21 nt, Artificial Sequence
  source: /note="Description of Artificial Sequence: Synthetic oligonucleotide"
gauucuuggaacgagguucuu

SEQ ID NO: 1879 - RNA, 21 nt, Artificial Sequence
  source: /note="Description of Artificial Sequence: Synthetic oligonucleotide"
cuuggaacgagguucucauuu

SEQ ID NO: 1880 - RNA, 21 nt, Artificial Sequence
  source: /note="Description of Artificial Sequence: Synthetic oligonucleotide"
ccucuggaaacacugaagagu

SEQ ID NO: 1881 - RNA, 21 nt, Artificial Sequence
  source: /note="Description of Artificial Sequence: Synthetic oligonucleotide"
cucccuagccuucuuuugggu

SEQ ID NO: 1882 - RNA, 21 nt, Artificial Sequence
  source: /note="Description of Artificial Sequence: Synthetic oligonucleotide"
ucccuagccuucuuuugggau

SEQ ID NO: 1883 - RNA, 21 nt, Artificial Sequence
  source: /note="Description of Artificial Sequence: Synthetic oligonucleotide"
guguaagccagaagaauguuu

SEQ ID NO: 1884 - RNA, 21 nt, Artificial Sequence
  source: /note="Description of Artificial Sequence: Synthetic oligonucleotide"
cucagaugcaaguccauucuu

SEQ ID NO: 1885 - RNA, 21 nt, Artificial Sequence
  source: /note="Description of Artificial Sequence: Synthetic oligonucleotide"
ugaggauucuuggaacgaggu

SEQ ID NO: 1886 - RNA, 21 nt, Artificial Sequence
  source: /note="Description of Artificial Sequence: Synthetic oligonucleotide"
uucuuggaacgagguucucau

SEQ ID NO: 1887 - RNA, 21 nt, Artificial Sequence
  source: /note="Description of Artificial Sequence: Synthetic oligonucleotide"
gaacgagguucucauuggagu

SEQ ID NO: 1888 - RNA, 21 nt, Artificial Sequence
  source: /note="Description of Artificial Sequence: Synthetic oligonucleotide"
caucucccuagccuucuuuuu

SEQ ID NO: 1889 - RNA, 21 nt, Artificial Sequence
  source: /note="Description of Artificial Sequence: Synthetic oligonucleotide"
uagccuucuuuugggaaagau

SEQ ID NO: 1890 - RNA, 21 nt, Artificial Sequence
  source: /note="Description of Artificial Sequence: Synthetic oligonucleotide"
gugucuaagaugagauuugau

SEQ ID NO: 1891 - RNA, 21 nt, Artificial Sequence
  source: /note="Description of Artificial Sequence: Synthetic oligonucleotide"
agaugcaaguccauucuuggu

SEQ ID NO: 1892 - RNA, 21 nt, Artificial Sequence
  source: /note="Description of Artificial Sequence: Synthetic oligonucleotide"
uaugcugaggauucuuggaau

SEQ ID NO: 1893 - RNA, 21 nt, Artificial Sequence
  source: /note="Description of Artificial Sequence: Synthetic oligonucleotide"
cugaggauucuuggaacgagu

SEQ ID NO: 1894 - RNA, 21 nt, Artificial Sequence
  source: /note="Description of Artificial Sequence: Synthetic oligonucleotide"
gaggauucuuggaacgagguu

SEQ ID NO: 1895 - RNA, 21 nt, Artificial Sequence
  source: /note="Description of Artificial Sequence: Synthetic oligonucleotide"
uggaacgagguucucauuggu

SEQ ID NO: 1896 - RNA, 21 nt, Artificial Sequence
  source: /note="Description of Artificial Sequence: Synthetic oligonucleotide"
ucaucucccuagccuucuuuu

SEQ ID NO: 1897 - RNA, 21 nt, Artificial Sequence
  source: /note="Description of Artificial Sequence: Synthetic oligonucleotide"
acacuguguaagccagaagau

SEQ ID NO: 1898 - RNA, 21 nt, Artificial Sequence
  source: /note="Description of Artificial Sequence: Synthetic oligonucleotide"
cuguguaagccagaagaaugu

SEQ ID NO: 1899 - RNA, 21 nt, Artificial Sequence
  source: /note="Description of Artificial Sequence: Synthetic oligonucleotide"
uguguaagccagaagaauguu

SEQ ID NO: 1900 - RNA, 21 nt, Artificial Sequence
  source: /note="Description of Artificial Sequence: Synthetic oligonucleotide"
guaagccagaagaauguuccu

SEQ ID NO: 1901 - RNA, 21 nt, Artificial Sequence
  source: /note="Description of Artificial Sequence: Synthetic oligonucleotide"
gggugucuaagaugagauuuu

SEQ ID NO: 1902 - RNA, 21 nt, Artificial Sequence
  source: /note="Description of Artificial Sequence: Synthetic oligonucleotide"
augcugaggauucuuggaacu

SEQ ID NO: 1903 - RNA, 21 nt, Artificial Sequence
  source: /note="Description of Artificial Sequence: Synthetic oligonucleotide"
ggauucuuggaacgagguucu

SEQ ID NO: 1904 - RNA, 21 nt, Artificial Sequence
  source: /note="Description of Artificial Sequence: Synthetic oligonucleotide"
aacgagguucucauuggagau

SEQ ID NO: 1905 - RNA, 21 nt, Artificial Sequence
  source: /note="Description of Artificial Sequence: Synthetic oligonucleotide"
agccucuggaaacacugaagu

SEQ ID NO: 1906 - RNA, 21 nt, Artificial Sequence
  source: /note="Description of Artificial Sequence: Synthetic oligonucleotide"
cuggaaaauccagggacaauu

SEQ ID NO: 1907 - RNA, 21 nt, Artificial Sequence
  source: /note="Description of Artificial Sequence: Synthetic oligonucleotide"
ggugucuaagaugagauuugu

SEQ ID NO: 1908 - RNA, 23 nt, Artificial Sequence
  source: /note="Description of Artificial Sequence: Synthetic oligonucleotide"
aauucuggaacauucuucuggcu

SEQ ID NO: 1909 - RNA, 23 nt, Artificial Sequence
  source: /note="Description of Artificial Sequence: Synthetic oligonucleotide"
aaagaauggacuugcaucugagu

SEQ ID NO: 1910 - RNA, 23 nt, Artificial Sequence
  source: /note="Description of Artificial Sequence: Synthetic oligonucleotide"
acaagaauggacuugcaucugag

SEQ ID NO: 1911 - RNA, 23 nt, Artificial Sequence
  source: /note="Description of Artificial Sequence: Synthetic oligonucleotide"
accaaaagaaggcuagggagaug

SEQ ID NO: 1912 - RNA, 23 nt, Artificial Sequence
  source: /note="Description of Artificial Sequence: Synthetic oligonucleotide"
acucuuucccaaaagaaggcuag

SEQ ID NO: 1913 - RNA, 23 nt, Artificial Sequence
  source: /note="Description of Artificial Sequence: Synthetic oligonucleotide"
acuugggagaguauuuaauuccc

SEQ ID NO: 1914 - RNA, 23 nt, Artificial Sequence
  source: /note="Description of Artificial Sequence: Synthetic oligonucleotide"
aaaccucguuccaagaauccuca

SEQ ID NO: 1915 - RNA, 23 nt, Artificial Sequence
  source: /note="Description of Artificial Sequence: Synthetic oligonucleotide"
acaaugagaaccucguuccaaga

SEQ ID NO: 1916 - RNA, 23 nt, Artificial Sequence
  source: /note="Description of Artificial Sequence: Synthetic oligonucleotide"
acaaaagaaggcuagggagauga

SEQ ID NO: 1917 - RNA, 23 nt, Artificial Sequence
  source: /note="Description of Artificial Sequence: Synthetic oligonucleotide"
auucccaaaagaaggcuagggag

SEQ ID NO: 1918 - RNA, 23 nt, Artificial Sequence
  source: /note="Description of Artificial Sequence: Synthetic oligonucleotide"
acuuucccaaaagaaggcuaggg

SEQ ID NO: 1919 - RNA, 23 nt, Artificial Sequence
  source: /note="Description of Artificial Sequence: Synthetic oligonucleotide"
acauucuggaacauucuucuggc

SEQ ID NO: 1920 - RNA, 23 nt, Artificial Sequence
  source: /note="Description of Artificial Sequence: Synthetic oligonucleotide"
auugggagaguauuuaauucccg

SEQ ID NO: 1921 - RNA, 23 nt, Artificial Sequence
  source: /note="Description of Artificial Sequence: Synthetic oligonucleotide"
aacuugggagaguauuuaauucc

SEQ ID NO: 1922 - RNA, 23 nt, Artificial Sequence
  source: /note="Description of Artificial Sequence: Synthetic oligonucleotide"
aaccaagaauggacuugcaucug

SEQ ID NO: 1923 - RNA, 23 nt, Artificial Sequence
  source: /note="Description of Artificial Sequence: Synthetic oligonucleotide"
aagaaccucguuccaagaauccu

SEQ ID NO: 1924 - RNA, 23 nt, Artificial Sequence
  source: /note="Description of Artificial Sequence: Synthetic oligonucleotide"
aaaugagaaccucguuccaagaa

SEQ ID NO: 1925 - RNA, 23 nt, Artificial Sequence
  source: /note="Description of Artificial Sequence: Synthetic oligonucleotide"
acucuucaguguuuccagaggcu

SEQ ID NO: 1926 - RNA, 23 nt, Artificial Sequence
  source: /note="Description of Artificial Sequence: Synthetic oligonucleotide"
acccaaaagaaggcuagggagau

SEQ ID NO: 1927 - RNA, 23 nt, Artificial Sequence
  source: /note="Description of Artificial Sequence: Synthetic oligonucleotide"
aucccaaaagaaggcuagggaga

SEQ ID NO: 1928 - RNA, 23 nt, Artificial Sequence
  source: /note="Description of Artificial Sequence: Synthetic oligonucleotide"
aaacauucuucuggcuuacacag

SEQ ID NO: 1929 - RNA, 23 nt, Artificial Sequence
  source: /note="Description of Artificial Sequence: Synthetic oligonucleotide"
aagaauggacuugcaucugagua

SEQ ID NO: 1930 - RNA, 23 nt, Artificial Sequence
  source: /note="Description of Artificial Sequence: Synthetic oligonucleotide"
accucguuccaagaauccucagc

SEQ ID NO: 1931 - RNA, 23 nt, Artificial Sequence
  source: /note="Description of Artificial Sequence: Synthetic oligonucleotide"
augagaaccucguuccaagaauc

SEQ ID NO: 1932 - RNA, 23 nt, Artificial Sequence
  source: /note="Description of Artificial Sequence: Synthetic oligonucleotide"
acuccaaugagaaccucguucca

SEQ ID NO: 1933 - RNA, 23 nt, Artificial Sequence
  source: /note="Description of Artificial Sequence: Synthetic oligonucleotide"
aaaaagaaggcuagggagaugau

SEQ ID NO: 1934 - RNA, 23 nt, Artificial Sequence
  source: /note="Description of Artificial Sequence: Synthetic oligonucleotide"
aucuuucccaaaagaaggcuagg

SEQ ID NO: 1935 - RNA, 23 nt, Artificial Sequence
  source: /note="Description of Artificial Sequence: Synthetic oligonucleotide"
aucaaaucucaucuuagacaccc

SEQ ID NO: 1936 - RNA, 23 nt, Artificial Sequence
  source: /note="Description of Artificial Sequence: Synthetic oligonucleotide"
accaagaauggacuugcaucuga

SEQ ID NO: 1937 - RNA, 23 nt, Artificial Sequence
  source: /note="Description of Artificial Sequence: Synthetic oligonucleotide"
auuccaagaauccucagcauaaa

SEQ ID NO: 1938 - RNA, 23 nt, Artificial Sequence
  source: /note="Description of Artificial Sequence: Synthetic oligonucleotide"
acucguuccaagaauccucagca

SEQ ID NO: 1939 - RNA, 23 nt, Artificial Sequence
  source: /note="Description of Artificial Sequence: Synthetic oligonucleotide"
aaccucguuccaagaauccucag

SEQ ID NO: 1940 - RNA, 23 nt, Artificial Sequence
  source: /note="Description of Artificial Sequence: Synthetic oligonucleotide"
accaaugagaaccucguuccaag

SEQ ID NO: 1941 - RNA, 23 nt, Artificial Sequence
  source: /note="Description of Artificial Sequence: Synthetic oligonucleotide"
aaaagaaggcuagggagaugaug

SEQ ID NO: 1942 - RNA, 23 nt, Artificial Sequence
  source: /note="Description of Artificial Sequence: Synthetic oligonucleotide"
aucuucuggcuuacacagugucc

SEQ ID NO: 1943 - RNA, 23 nt, Artificial Sequence
  source: /note="Description of Artificial Sequence: Synthetic oligonucleotide"
acauucuucuggcuuacacagug

SEQ ID NO: 1944 - RNA, 23 nt, Artificial Sequence
  source: /note="Description of Artificial Sequence: Synthetic oligonucleotide"
aacauucuucuggcuuacacagu

SEQ ID NO: 1945 - RNA, 23 nt, Artificial Sequence
  source: /note="Description of Artificial Sequence: Synthetic oligonucleotide"
aggaacauucuucuggcuuacac

SEQ ID NO: 1946 - RNA, 23 nt, Artificial Sequence
  source: /note="Description of Artificial Sequence: Synthetic oligonucleotide"
aaaaucucaucuuagacacccag

SEQ ID NO: 1947 - RNA, 23 nt, Artificial Sequence
  source: /note="Description of Artificial Sequence: Synthetic oligonucleotide"
aguuccaagaauccucagcauaa

SEQ ID NO: 1948 - RNA, 23 nt, Artificial Sequence
  source: /note="Description of Artificial Sequence: Synthetic oligonucleotide"
agaaccucguuccaagaauccuc

SEQ ID NO: 1949 - RNA, 23 nt, Artificial Sequence
  source: /note="Description of Artificial Sequence: Synthetic oligonucleotide"
aucuccaaugagaaccucguucc

SEQ ID NO: 1950 - RNA, 23 nt, Artificial Sequence
  source: /note="Description of Artificial Sequence: Synthetic oligonucleotide"
acuucaguguuuccagaggcucc

SEQ ID NO: 1951 - RNA, 23 nt, Artificial Sequence
  source: /note="Description of Artificial Sequence: Synthetic oligonucleotide"
aauugucccuggauuuuccagag

SEQ ID NO: 1952 - RNA, 23 nt, Artificial Sequence
  source: /note="Description of Artificial Sequence: Synthetic oligonucleotide"
acaaaucucaucuuagacaccca

SEQ ID NO: 1953 - RNA, 23 nt, Mus musculus
agccagaagaauguuccagaaug

SEQ ID NO: 1954 - RNA, 23 nt, Mus musculus
acucagaugcaaguccauucuug

SEQ ID NO: 1955 - RNA, 23 nt, Mus musculus
cucagaugcaaguccauucuugg

SEQ ID NO: 1956 - RNA, 23 nt, Mus musculus
caucucccuagccuucuuuuggg

SEQ ID NO: 1957 - RNA, 23 nt, Mus musculus
cuagccuucuuuugggaaagaga

SEQ ID NO: 1958 - RNA, 23 nt, Mus musculus
gggaauuaaauacucucccaagu

SEQ ID NO: 1959 - RNA, 23 nt, Mus musculus
ugaggauucuuggaacgagguuc

SEQ ID NO: 1960 - RNA, 23 nt, Mus musculus
ucuuggaacgagguucucauugg

SEQ ID NO: 1961 - RNA, 23 nt, Mus musculus
ucaucucccuagccuucuuuugg

SEQ ID NO: 1962 - RNA, 23 nt, Mus musculus
cucccuagccuucuuuugggaaa

SEQ ID NO: 1963 - RNA, 23 nt, Mus musculus
cccuagccuucuuuugggaaaga

SEQ ID NO: 1964 - RNA, 23 nt, Mus musculus
gccagaagaauguuccagaaugu

SEQ ID NO: 1965 - RNA, 23 nt, Mus musculus
cgggaauuaaauacucucccaag

SEQ ID NO: 1966 - RNA, 23 nt, Mus musculus
ggaauuaaauacucucccaagua

SEQ ID NO: 1967 - RNA, 23 nt, Mus musculus
cagaugcaaguccauucuugguc

SEQ ID NO: 1968 - RNA, 23 nt, Mus musculus
aggauucuuggaacgagguucuc

SEQ ID NO: 1969 - RNA, 23 nt, Mus musculus
uucuuggaacgagguucucauug

SEQ ID NO: 1970 - RNA, 23 nt, Mus musculus
agccucuggaaacacugaagagc

SEQ ID NO: 1971 - RNA, 23 nt, Mus musculus
aucucccuagccuucuuuuggga

SEQ ID NO: 1972 - RNA, 23 nt, Mus musculus
ucucccuagccuucuuuugggaa

SEQ ID NO: 1973 - RNA, 23 nt, Mus musculus
cuguguaagccagaagaauguuc

SEQ ID NO: 1974 - RNA, 23 nt, Mus musculus
uacucagaugcaaguccauucuu

SEQ ID NO: 1975 - RNA, 23 nt, Mus musculus
gcugaggauucuuggaacgaggu

SEQ ID NO: 1976 - RNA, 23 nt, Mus musculus
gauucuuggaacgagguucucau

SEQ ID NO: 1977 - RNA, 23 nt, Mus musculus
uggaacgagguucucauuggaga

SEQ ID NO: 1978 - RNA, 23 nt, Mus musculus
aucaucucccuagccuucuuuug

SEQ ID NO: 1979 - RNA, 23 nt, Mus musculus
ccuagccuucuuuugggaaagag

SEQ ID NO: 1980 - RNA, 23 nt, Mus musculus
gggugucuaagaugagauuugau

SEQ ID NO: 1981 - RNA, 23 nt, Mus musculus
ucagaugcaaguccauucuuggu

SEQ ID NO: 1982 - RNA, 23 nt, Mus musculus
uuuaugcugaggauucuuggaac

SEQ ID NO: 1983 - RNA, 23 nt, Mus musculus
ugcugaggauucuuggaacgagg

SEQ ID NO: 1984 - RNA, 23 nt, Mus musculus
cugaggauucuuggaacgagguu

SEQ ID NO: 1985 - RNA, 23 nt, Mus musculus
cuuggaacgagguucucauugga

SEQ ID NO: 1986 - RNA, 23 nt, Mus musculus
caucaucucccuagccuucuuuu

SEQ ID NO: 1987 - RNA, 23 nt, Mus musculus
ggacacuguguaagccagaagaa

SEQ ID NO: 1988 - RNA, 23 nt, Mus musculus
cacuguguaagccagaagaaugu

SEQ ID NO: 1989 - RNA, 23 nt, Mus musculus
acuguguaagccagaagaauguu

SEQ ID NO: 1990 - RNA, 23 nt, Mus musculus
guguaagccagaagaauguucca

SEQ ID NO: 1991 - RNA, 23 nt, Mus musculus
cugggugucuaagaugagauuug

SEQ ID NO: 1992 - RNA, 23 nt, Mus musculus
uuaugcugaggauucuuggaacg

SEQ ID NO: 1993 - RNA, 23 nt, Mus musculus
gaggauucuuggaacgagguucu

SEQ ID NO: 1994 - RNA, 23 nt, Mus musculus
ggaacgagguucucauuggagau

SEQ ID NO: 1995 - RNA, 23 nt, Mus musculus
ggagccucuggaaacacugaaga

SEQ ID NO: 1996 - RNA, 23 nt, Mus musculus
cucuggaaaauccagggacaauc

SEQ ID NO: 1997 - RNA, 23 nt, Mus musculus
ugggugucuaagaugagauuuga

SEQ ID NO: 1998 - RNA, 21 nt, Artificial Sequence
  source: /note="Description of Artificial Sequence: Synthetic oligonucleotide"
ccagaagaauguuccagaauu

SEQ ID NO: 1999 - RNA, 21 nt, Artificial Sequence
  source: /note="Description of Artificial Sequence: Synthetic oligonucleotide"
ucagaugcaaguccauucuuu

SEQ ID NO: 2000 - RNA, 21 nt, Artificial Sequence
  source: /note="Description of Artificial Sequence: Synthetic oligonucleotide"
cagaugcaaguccauucuugu

SEQ ID NO: 2001 - RNA, 21 nt, Artificial Sequence
  source: /note="Description of Artificial Sequence: Synthetic oligonucleotide"
ucucccuagccuucuuuuggu

SEQ ID NO: 2002 - RNA, 21 nt, Artificial Sequence
  source: /note="Description of Artificial Sequence: Synthetic oligonucleotide"
agccuucuuuugggaaagagu

SEQ ID NO: 2003 - RNA, 21 nt, Artificial Sequence
  source: /note="Description of Artificial Sequence: Synthetic oligonucleotide"
gaauuaaauacucucccaagu

SEQ ID NO: 2004 - RNA, 21 nt, Artificial Sequence
  source: /note="Description of Artificial Sequence: Synthetic oligonucleotide"
aggauucuuggaacgagguuu

SEQ ID NO: 2005 - RNA, 21 nt, Artificial Sequence
  source: /note="Description of Artificial Sequence: Synthetic oligonucleotide"
uuggaacgagguucucauugu

SEQ ID NO: 2006 - RNA, 21 nt, Artificial Sequence
  source: /note="Description of Artificial Sequence: Synthetic oligonucleotide"
aucucccuagccuucuuuugu

SEQ ID NO: 2007 - RNA, 21 nt, Artificial Sequence
  source: /note="Description of Artificial Sequence: Synthetic oligonucleotide"
cccuagccuucuuuugggaau

SEQ ID NO: 2008 - RNA, 21 nt, Artificial Sequence
  source: /note="Description of Artificial Sequence: Synthetic oligonucleotide"
cuagccuucuuuugggaaagu

SEQ ID NO: 2009 - RNA, 21 nt, Artificial Sequence
  source: /note="Description of Artificial Sequence: Synthetic oligonucleotide"
cagaagaauguuccagaaugu

SEQ ID NO: 2010 - RNA, 21 nt, Artificial Sequence
  source: /note="Description of Artificial Sequence: Synthetic oligonucleotide"
ggaauuaaauacucucccaau

SEQ ID NO: 2011 - RNA, 21 nt, Artificial Sequence
  source: /note="Description of Artificial Sequence: Synthetic oligonucleotide"
aauuaaauacucucccaaguu

SEQ ID NO: 2012 - RNA, 21 nt, Artificial Sequence
  source: /note="Description of Artificial Sequence: Synthetic oligonucleotide"
gaugcaaguccauucuugguu

SEQ ID NO: 2013 - RNA, 21 nt, Artificial Sequence
  source: /note="Description of Artificial Sequence: Synthetic oligonucleotide"
gauucuuggaacgagguucuu

SEQ ID NO: 2014 - RNA, 21 nt, Artificial Sequence
  source: /note="Description of Artificial Sequence: Synthetic oligonucleotide"
cuuggaacgagguucucauuu

SEQ ID NO: 2015 - RNA, 21 nt, Artificial Sequence
  source: /note="Description of Artificial Sequence: Synthetic oligonucleotide"
ccucuggaaacacugaagagu

SEQ ID NO: 2016 - RNA, 21 nt, Artificial Sequence
  source: /note="Description of Artificial Sequence: Synthetic oligonucleotide"
cucccuagccuucuuuugggu

SEQ ID NO: 2017 - RNA, 21 nt, Artificial Sequence
  source: /note="Description of Artificial Sequence: Synthetic oligonucleotide"
ucccuagccuucuuuugggau

SEQ ID NO: 2018 - RNA, 21 nt, Artificial Sequence
  source: /note="Description of Artificial Sequence: Synthetic oligonucleotide"
guguaagccagaagaauguuu

SEQ ID NO: 2019 - RNA, 21 nt, Artificial Sequence
  source: /note="Description of Artificial Sequence: Synthetic oligonucleotide"
cucagaugcaaguccauucuu

SEQ ID NO: 2020 - RNA, 21 nt, Artificial Sequence
  source: /note="Description of Artificial Sequence: Synthetic oligonucleotide"
ugaggauucuuggaacgaggu

SEQ ID NO: 2021 - RNA, 21 nt, Artificial Sequence
  source: /note="Description of Artificial Sequence: Synthetic oligonucleotide"
uucuuggaacgagguucucau

SEQ ID NO: 2022 - RNA, 21 nt, Artificial Sequence
  source: /note="Description of Artificial Sequence: Synthetic oligonucleotide"
gaacgagguucucauuggagu

SEQ ID NO: 2023 - RNA, 21 nt, Artificial Sequence
  source: /note="Description of Artificial Sequence: Synthetic oligonucleotide"
caucucccuagccuucuuuuu

SEQ ID NO: 2024 - RNA, 21 nt, Artificial Sequence
  source: /note="Description of Artificial Sequence: Synthetic oligonucleotide"
uagccuucuuuugggaaagau

SEQ ID NO: 2025 - RNA, 21 nt, Artificial Sequence
  source: /note="Description of Artificial Sequence: Synthetic oligonucleotide"
gugucuaagaugagauuugau

SEQ ID NO: 2026 - RNA, 21 nt, Artificial Sequence
  source: /note="Description of Artificial Sequence: Synthetic oligonucleotide"
agaugcaaguccauucuuggu

SEQ ID NO: 2027 - RNA, 21 nt, Artificial Sequence
  source: /note="Description of Artificial Sequence: Synthetic oligonucleotide"
uaugcugaggauucuuggaau

SEQ ID NO: 2028 - RNA, 21 nt, Artificial Sequence
  source: /note="Description of Artificial Sequence: Synthetic oligonucleotide"
cugaggauucuuggaacgagu

SEQ ID NO: 2029 - RNA, 21 nt, Artificial Sequence
  source: /note="Description of Artificial Sequence: Synthetic oligonucleotide"
gaggauucuuggaacgagguu

SEQ ID NO: 2030 - RNA, 21 nt, Artificial Sequence
  source: /note="Description of Artificial Sequence: Synthetic oligonucleotide"
uggaacgagguucucauuggu

SEQ ID NO: 2031 - RNA, 21 nt, Artificial Sequence
  source: /note="Description of Artificial Sequence: Synthetic oligonucleotide"
ucaucucccuagccuucuuuu

SEQ ID NO: 2032 - RNA, 21 nt, Artificial Sequence
  source: /note="Description of Artificial Sequence: Synthetic oligonucleotide"
acacuguguaagccagaagau

SEQ ID NO: 2033 - RNA, 21 nt, Artificial Sequence
  source: /note="Description of Artificial Sequence: Synthetic oligonucleotide"
cuguguaagccagaagaaugu

SEQ ID NO: 2034 - RNA, 21 nt, Artificial Sequence
  source: /note="Description of Artificial Sequence: Synthetic oligonucleotide"
uguguaagccagaagaauguu

SEQ ID NO: 2035 - RNA, 21 nt, Artificial Sequence
  source: /note="Description of Artificial Sequence: Synthetic oligonucleotide"
guaagccagaagaauguuccu

SEQ ID NO: 2036 - RNA, 21 nt, Artificial Sequence
  source: /note="Description of Artificial Sequence: Synthetic oligonucleotide"
gggugucuaagaugagauuuu

SEQ ID NO: 2037 - RNA, 21 nt, Artificial Sequence
  source: /note="Description of Artificial Sequence: Synthetic oligonucleotide"
augcugaggauucuuggaacu

SEQ ID NO: 2038 - RNA, 21 nt, Artificial Sequence
  source: /note="Description of Artificial Sequence: Synthetic oligonucleotide"
ggauucuuggaacgagguucu

SEQ ID NO: 2039 - RNA, 21 nt, Artificial Sequence
  source: /note="Description of Artificial Sequence: Synthetic oligonucleotide"
aacgagguucucauuggagau

SEQ ID NO: 2040 - RNA, 21 nt, Artificial Sequence
  source: /note="Description of Artificial Sequence: Synthetic oligonucleotide"
agccucuggaaacacugaagu

SEQ ID NO: 2041 - RNA, 21 nt, Artificial Sequence
  source: /note="Description of Artificial Sequence: Synthetic oligonucleotide"
cuggaaaauccagggacaauu

SEQ ID NO: 2042 - RNA, 21 nt, Artificial Sequence
  source: /note="Description of Artificial Sequence: Synthetic oligonucleotide"
ggugucuaagaugagauuugu

SEQ ID NO: 2043 - RNA, 23 nt, Artificial Sequence
  source: /note="Description of Artificial Sequence: Synthetic oligonucleotide"
aauucuggaacauucuucuggcu

SEQ ID NO: 2044 - RNA, 23 nt, Artificial Sequence
  source: /note="Description of Artificial Sequence: Synthetic oligonucleotide"
aaagaauggacuugcaucugagu

SEQ ID NO: 2045 - RNA, 23 nt, Artificial Sequence
  source: /note="Description of Artificial Sequence: Synthetic oligonucleotide"
acaagaauggacuugcaucugag

SEQ ID NO: 2046 - RNA, 23 nt, Artificial Sequence
  source: /note="Description of Artificial Sequence: Synthetic oligonucleotide"
accaaaagaaggcuagggagaug

SEQ ID NO: 2047 - RNA, 23 nt, Artificial Sequence
  source: /note="Description of Artificial Sequence: Synthetic oligonucleotide"
acucuuucccaaaagaaggcuag

SEQ ID NO: 2048 - RNA, 23 nt, Artificial Sequence
  source: /note="Description of Artificial Sequence: Synthetic oligonucleotide"
acuugggagaguauuuaauuccc

SEQ ID NO: 2049 - RNA, 23 nt, Artificial Sequence
  source: /note="Description of Artificial Sequence: Synthetic oligonucleotide"
aaaccucguuccaagaauccuca

SEQ ID NO: 2050 - RNA, 23 nt, Artificial Sequence
  source: /note="Description of Artificial Sequence: Synthetic oligonucleotide"
acaaugagaaccucguuccaaga

SEQ ID NO: 2051 - RNA, 23 nt, Artificial Sequence
  source: /note="Description of Artificial Sequence: Synthetic oligonucleotide"
acaaaagaaggcuagggagauga

SEQ ID NO: 2052 - RNA, 23 nt, Artificial Sequence
  source: /note="Description of Artificial Sequence: Synthetic oligonucleotide"
auucccaaaagaaggcuagggag

SEQ ID NO: 2053 - RNA, 23 nt, Artificial Sequence
  source: /note="Description of Artificial Sequence: Synthetic oligonucleotide"
acuuucccaaaagaaggcuaggg

SEQ ID NO: 2054 - RNA, 23 nt, Artificial Sequence
  source: /note="Description of Artificial Sequence: Synthetic oligonucleotide"
acauucuggaacauucuucuggc

SEQ ID NO: 2055 - RNA, 23 nt, Artificial Sequence
  source: /note="Description of Artificial Sequence: Synthetic oligonucleotide"
auugggagaguauuuaauucccg

SEQ ID NO: 2056 - RNA, 23 nt, Artificial Sequence
  source: /note="Description of Artificial Sequence: Synthetic oligonucleotide"
aacuugggagaguauuuaauucc

SEQ ID NO: 2057 - RNA, 23 nt, Artificial Sequence
  source: /note="Description of Artificial Sequence: Synthetic oligonucleotide"
aaccaagaauggacuugcaucug

SEQ ID NO: 2058 - RNA, 23 nt, Artificial Sequence
  source: /note="Description of Artificial Sequence: Synthetic oligonucleotide"
aagaaccucguuccaagaauccu

SEQ ID NO: 2059 - RNA, 23 nt, Artificial Sequence
  source: /note="Description of Artificial Sequence: Synthetic oligonucleotide"
aaaugagaaccucguuccaagaa

SEQ ID NO: 2060 - RNA, 23 nt, Artificial Sequence
  source: /note="Description of Artificial Sequence: Synthetic oligonucleotide"
acucuucaguguuuccagaggcu

SEQ ID NO: 2061 - RNA, 23 nt, Artificial Sequence
  source: /note="Description of Artificial Sequence: Synthetic oligonucleotide"
acccaaaagaaggcuagggagau

SEQ ID NO: 2062 - RNA, 23 nt, Artificial Sequence
  source: /note="Description of Artificial Sequence: Synthetic oligonucleotide"
aucccaaaagaaggcuagggaga

SEQ ID NO: 2063 - RNA, 23 nt, Artificial Sequence
  source: /note="Description of Artificial Sequence: Synthetic oligonucleotide"
aaacauucuucuggcuuacacag

SEQ ID NO: 2064 - RNA, 23 nt, Artificial Sequence
  source: /note="Description of Artificial Sequence: Synthetic oligonucleotide"
aagaauggacuugcaucugagua

SEQ ID NO: 2065 - RNA, 23 nt, Artificial Sequence
  source: /note="Description of Artificial Sequence: Synthetic oligonucleotide"
accucguuccaagaauccucagc

SEQ ID NO: 2066 - RNA, 23 nt, Artificial Sequence
  source: /note="Description of Artificial Sequence: Synthetic oligonucleotide"
augagaaccucguuccaagaauc

SEQ ID NO: 2067 - RNA, 23 nt, Artificial Sequence
  source: /note="Description of Artificial Sequence: Synthetic oligonucleotide"
acuccaaugagaaccucguucca

SEQ ID NO: 2068 - RNA, 23 nt, Artificial Sequence
  source: /note="Description of Artificial Sequence: Synthetic oligonucleotide"
aaaaagaaggcuagggagaugau

SEQ ID NO: 2069 - RNA, 23 nt, Artificial Sequence
  source: /note="Description of Artificial Sequence: Synthetic oligonucleotide"
aucuuucccaaaagaaggcuagg

SEQ ID NO: 2070 - RNA, 23 nt, Artificial Sequence
  source: /note="Description of Artificial Sequence: Synthetic oligonucleotide"
aucaaaucucaucuuagacaccc

SEQ ID NO: 2071 - RNA, 23 nt, Artificial Sequence
  source: /note="Description of Artificial Sequence: Synthetic oligonucleotide"
accaagaauggacuugcaucuga

SEQ ID NO: 2072 - RNA, 23 nt, Artificial Sequence
  source: /note="Description of Artificial Sequence: Synthetic oligonucleotide"
auuccaagaauccucagcauaaa

SEQ ID NO: 2073 - RNA, 23 nt, Artificial Sequence
  source: /note="Description of Artificial Sequence: Synthetic oligonucleotide"
acucguuccaagaauccucagca

SEQ ID NO: 2074 - RNA, 23 nt, Artificial Sequence
  source: /note="Description of Artificial Sequence: Synthetic oligonucleotide"
aaccucguuccaagaauccucag

SEQ ID NO: 2075 - RNA, 23 nt, Artificial Sequence
  source: /note="Description of Artificial Sequence: Synthetic oligonucleotide"
accaaugagaaccucguuccaag

SEQ ID NO: 2076 - RNA, 23 nt, Artificial Sequence
  source: /note="Description of Artificial Sequence: Synthetic oligonucleotide"
aaaagaaggcuagggagaugaug

SEQ ID NO: 2077 - RNA, 23 nt, Artificial Sequence
  source: /note="Description of Artificial Sequence: Synthetic oligonucleotide"
aucuucuggcuuacacagugucc

SEQ ID NO: 2078 - RNA, 23 nt, Artificial Sequence
  source: /note="Description of Artificial Sequence: Synthetic oligonucleotide"
acauucuucuggcuuacacagug

SEQ ID NO: 2079 - RNA, 23 nt, Artificial Sequence
  source: /note="Description of Artificial Sequence: Synthetic oligonucleotide"
aacauucuucuggcuuacacagu

SEQ ID NO: 2080 - RNA, 23 nt, Artificial Sequence
  source: /note="Description of Artificial Sequence: Synthetic oligonucleotide"
aggaacauucuucuggcuuacac

SEQ ID NO: 2081 - RNA, 23 nt, Artificial Sequence
  source: /note="Description of Artificial Sequence: Synthetic oligonucleotide"
aaaaucucaucuuagacacccag

SEQ ID NO: 2082 - RNA, 23 nt, Artificial Sequence
  source: /note="Description of Artificial Sequence: Synthetic oligonucleotide"
aguuccaagaauccucagcauaa

SEQ ID NO: 2083 - RNA, 23 nt, Artificial Sequence
  source: /note="Description of Artificial Sequence: Synthetic oligonucleotide"
agaaccucguuccaagaauccuc

SEQ ID NO: 2084 - RNA, 23 nt, Artificial Sequence
  source: /note="Description of Artificial Sequence: Synthetic oligonucleotide"
aucuccaaugagaaccucguucc

SEQ ID NO: 2085 - RNA, 23 nt, Artificial Sequence
  source: /note="Description of Artificial Sequence: Synthetic oligonucleotide"
acuucaguguuuccagaggcucc

SEQ ID NO: 2086 - RNA, 23 nt, Artificial Sequence
  source: /note="Description of Artificial Sequence: Synthetic oligonucleotide"
aauugucccuggauuuuccagag

SEQ ID NO: 2087 - RNA, 23 nt, Artificial Sequence
  source: /note="Description of Artificial Sequence: Synthetic oligonucleotide"
acaaaucucaucuuagacaccca

SEQ ID NO: 2088-2999 - skipped (912 entries)

SEQ ID NO: 3000 - protein, 16 aa, Unknown
  source: /note="Description of Unknown: RFGF peptide"
AAVALLPAVLLALLAP

SEQ ID NO: 3001 - protein, 11 aa, Unknown
  source: /note="Description of Unknown: RFGF analogue peptide"
AALLPVLLAAP

SEQ ID NO: 3002 - protein, 13 aa, Human immunodeficiency virus 1
GRKKRRQRRRPPQ

SEQ ID NO: 3003 - protein, 16 aa, Drosophila sp.
RQIKIWFQNRRMKWKK

SEQ ID NO: 3004-3999 - skipped (996 entries)

SEQ ID NO: 4000 - DNA, 7287 bp, Homo sapiens
cttgccgccgccacctcgcggagaagccagccatgggcgccgccggctcctccgcgctggcgcgctttgtcctcctcgcgcaatcccggcccgggtggctcggggttgccgcgctgggcctgaccgcggtggcgctgggggctgtcgcctggcgccgcgcatggcccacgcggcgccggcggctgctgcagcaggtgggcacagtggcgcagctctggatctaccctgtgaaatcctgcaagggggtgccggtgagcgaggcggagtgcacggccatggggctgcgcagcggcaacctgcgggacaggttttggcttgtgatcaaccaggagggaaacatggttactgctcgccaggaacctcgcctggtcctgatttccctgacctgcgatggtgacaccctgactctcagtgcagcctacacaaaggacctactactgcctatcaaaacgcccaccacaaatgcagtgcacaagtgcagagtgcacggcctggagatagagggcagggactgtggcgaggccaccgcccagtggataaccagcttcctgaagtcacagccctaccgcctggtgcacttcgagcctcacatgcgaccgagacgtcctcatcaaatagcagacttgttccgacccaaggaccagattgcttactcagacaccagcccattcttgatcctttctgaggcgtcgctggcggatctcaactccaggctagagaagaaagttaaagcaaccaacttcaggcccaatattgtaatttcaggatgcgatgtctatgcagaggattcttgggatgagcttcttattggtgacgtggaactgaaaagggtgatggcttgttccagatgcattttaaccacagtggacccagacaccggtgtcatgagcaggaaggaaccgctggaaacactgaagagttatcgccagtgtgacccttcagaacgaaagttatatggaaaatcaccactctttgggcagtattttgtgctggaaaacccagggaccatcaaagtgggagaccctgtgtacctgctgggccagtaatgggaaccgtatgtcctggaatattagatgccttttaaaaatgttctcaaaaatgacaacacttgaagcatggtgtttcagaactgagacctctacattttctttaaatttgtgattttcacatttttcgtcttttggacttctggtgtctcaatgcttcaatgtcccagtgcaaaaagtaaagaaatatagtctcaataacttagtaggacttcagtaagtcacttaaatgacaagacaggattctgaaaactccccgtttaactgattatggaatagttctttctcctgcttctccgtttatctaccaagagcgcagacttgcatcctgtcactaccactcgttagagaaagagaagaagagaaagaggaagagtgggtgggctggaagaatatcctagaatgtgttattgcccctgttcatgaggtacgcaatgaaaattaaattgcaccccaaatatggctggaatgccacttcccttttcttctcaagccccgggctagcttttgaaatggcataaagactgaggtgaccttcaggaagcactgcagatattaattttccatagatctggatctggccctgctgcttctcagacagcattggatttcctaaaggtgctcaggaggatggttgtgtagtcatggaggacccctggatccttgccattcccctcagctaatgacggagtgctccttctccagttccgggtgaaaaagttctgaattctgtggaggagaagaaaagtgattcagtgatttcagatagactactgaaaacctttaaagggggaaaaggaaagcatatgtcagttgtttaaaacccaatatctattttttaactgattgtataactctaagatctgatgaagtatattttttattgccattttgtcctttgattatattgggaagttgactaaacttgaaaaatgtttttaaaactgtgaataaatggaagctactttgactagtttcagatcttactaacttcttggcacaaagttagactgtgaaagctgactgaggctgggcacaggggctcatgcctgtaattccagcactttgggaggccaaggtgggagaatggcttgagcccaggagtttgagaccagcccagaaaatataatgggatcctgtcgctacaaaatgtttttaaaatgcactcggtgtggtggtgtgtgcctgcagtcctggctatggctactcgggaggatgaggtagaaggattggttgagcccaggagcgggagattgaggctgcagtgagttatgattgcaccactacactccagcctgagtgatagagtgagaccctatctctaaaaaagaaacaggaaaaaaaaagaaagctgactgaggtgaatgggcaaagccagtaattctgacacctgaccacagctgggtcttctgcataatggacctcctcacccacagcctcccaggcaagcacccatgtttgaaggactatcaagtcaacatgctttttaccaaaagctgcacatttttcactttgattttataaaagaggtcagtaatcgctgaaatctagctgagccctgaagtaaagttctgagcaaagaggtgcatgtgcttgttttatggttggtgaattattacagtttgttttctgcatgcttggcatgaggtgaataattacatcaattttccagagaacctgggccatcaccttccccaacaagtccagttgatgttgaaactacagatagattgagacaaagcgaagtgttcagcaagtagcattactaatgggaccgggggacccgtgggagagtgagtgtacacaggatttaggaaaccatgtgaatatgggctctctgggaatagccaataggtagggagcaatcagaaacccaaggtttggtggctcttcctaggtatttataattagtggcaagtgaaagccttagtcctgaatttctaaccacttgtaagaactaacagccacttctctgtgccccgtccgggcagtaaccatcattctccatggacaggctctcggggtagctagctctgcagggcagcacccacgtggaagggagcacccagaaaccctcctcactgggcagacctgtccttctgtgcctcacagtgtgaggaagattcctgtttgaagagagaagttccagtgacctctagaatctcagagtagttgccaagctttctgtcagtgagatttaaaggccatttacttgtgtttattttatatttaatgagttggttaatgccagagacaaagctgatatcccatttattttggatactgagcatttgcacactattccacttgaaatatagaatcaggaatgtaggccatcccagactttcagatcttacaacagcaaatgacagatgtttgagatcaggccaaaatatccaccctcggtgggcatctcctctgtgtggcaacttatgctgcagccacagtggggagtcacaaactcagagctggaggtcttgaaaaggacaatgtgggccaggctccggaggggctgcctaaaggcttgcttttgtgactctcctgcagaaaatgttagaaacttccaaccgaaagacgagggcagcaacttatacacacgaaggcagaaagaaattggggaaggggaggctgttggaattcaggccgttgtcctatagggagaaatactcctcctctccttctccctttactgataacggggcatggtgaggagatgagcttgtgagggtctgccagtttggtaagagtgcatggggaggttgggtaaattagactagccaaatgggacttcgggaaaccatttatgaggctgtcaccaacagtgatggcaggctgaaattccaggcaagtgctcccagcattccaagagtgtatcaaattaaagcaacccatgatggtggagaacagatacattaaagttccttgaaaatgacagagtggctctcagaccagaccttgattgtgggtataatcggagtgttgctaccacaccctaacactgcatttcccgtgttttattggtccatggaattctgaaagtttgcctttcgggatgcttctaaaaacaattccatggaccagtaagtttggaaagtcctgcgtgcctcacttctcttcaaaggcaaaaggctctggagaggccttcatgaagacatctgtgtttaatgctgcccttcccaaaggtctgtttttgactgtcttttgagaaatgatcctctgatctctaggcagaatgccagtgagccaaggaatcccagttagcaggaggggtgcactcatgggaagactgaagaagttaaaagttcccgccaagtgaaggagacctatcttgggacacttccccttgtcctctcccttgcccctcttgctggagtaaaaggatggaactgggacttgataggttaaaggaggtgtggagaagtgtcttagaccagctctcctgttgtgggccttagggagaagcactctctttcttcgggatcattttccaaacatgcatttttggatggatagggtggatcagggtgagggaagggaaaccaaactctctctaaccttgcccttacagcaatacctgtgatgtaagttacaaaaccacctgtgatgaaagtgctccaggatgcttcatgcaccagggaggggtgccctgtttctcttctgctagcttctcctttcttttttttttttcttcttttttttgagacagtgtctcactctgttgccaggctggagtgcagtggtgagatctcagctcactgcagcctctgcctcccaggttcaagcaattcttctgcctcagcctcccgagtagctggtgtgtctggagttggttccttctggtgggttcttggtctcgctgacttcaagaatgaagccacagaccttcgcagtgagtgttacagctcttaaaggtggcacggacccaaagtgagcagtagcaagatttattgtggagagcgaaagaacaaagcttcggaaggggacccaaatgggctgctgctgctggctggggtggccaccttttattcccttatttgtccctgcccatgtcctgctgattgctccattttacagagtgctgattggtccattttacagagtgctgattggtgcatttacaatcctttagctagacacagagtgccgattggtgagtttttacagtgctgattggtgcatttacaatcctttagctagacacagaacactgactggtgcatttataatcctctagctagaaagaaaagttctccaagtccccactagacccaggaagtccagctggcttcacctctcactgggactacaggtgcacaccaccacacccagctaatttttgtatttttagtagagacggggtttcaccatgttgttcaggatggtctcgaactcttgatctcgtgatctgcccgcctcggcctcccaaagtgctgggattacagttgtgagccaccacgcccggccctagcttttcctttctgttgcaagtcctctcaactagtgttgccttccaccctacaaagcagaattacctcagaagtcctatggccctgactctatctatgtctgcacaaagcactactgtgctttgctgtctgcaagaacagagattgtttgcttcaaccactttctctgaatggatgaatgagttatgatgatatctaaagttacccaatttcaagcaagaggaagaatctggctcggtaccacagatgttcttggaattgggatagtaaaaaagtccctgaggcatcccttggtctgctctgaccacactctcttcacaggaagaggcttgggccacagctctgactataactctgctcttcctccaaacacagctgaggaattgggtggtggggcacctgctcccatgctctgtggcctggctcagagagaagagttgccttaattacattattattcttcctggacaggctgtaggttgtgtaaagtaacaaaaaggactgagaagtgacttcccattcagcctcttccaaggccatttttgataggcaggtcaaattcactcacatttggttatttgttggccagtctagtgcattcacccttgctggtcctcagtcatgctcctttacctttacagagcatcctagactgctcttcctcttaccttccttgtgaaacccacaacccctagtccctccccttccctggcatttgttatgccctctaccaatccctgacctggtattggtcagtctccaatcctggtggatccctgtgggaactaagttaagtctaacttttgtctccctctttagaatttactgggagtactgtaaataaactattgttgttataattatttctgattaacatttttacacctaacaaagtctcagagagattgaatttactgggttgaagggaggagcaccttccacatgacctgcccagcaattaaagccgcttgttagtccgaggcccaggacggccgaggacagctggagagctcttcgttgcaggcagctctggttaacatcaaccgggaaagctctttgtaaacacatgaataattgatcgtccagcgctcacatagctaccgcggatctgagcccgtatgactcatttgcgagccattcctgtcgtctggatgccataacattggaggaatgatgatcgtttcttggaggttcttctgtggccagagttgccaagaccaaggctgtaatggtttgttatgatgacctttgttattccattaggctcaattgctttaaaaaatgatgtgtgcatactttaggaacgtttttaccctttatgttgacctgacatcatagtttatattataaaatgtattaatgacagaagagtgttttcatgtcccaaggacaaattttaacaaccataatctgccctcagtcatcataaatataaatgtattggtcaaacagatctcgttaatgtggccaagataaatgcaagtctatattttaaggcagtcgaagtcctagagaatatatctggagcttttgtggggctaagagatcttgtatatatgctatcaaaaggctgagaaaattaacatgttcccccctctgattttgcattggacagatataaatgtcttggggatgtcaagtaagattgttcacatagtttctggacaccattaatgcctgatggggtgaatcttagttcttaaagctatattctgctcattatgctcacagggcttttgaaaagagaacaaaataaagatttcaagtcttagcaa

SEQ ID NO: 4001 - DNA, 7287 bp, Homo sapiens
ttgctaagacttgaaatctttattttgttctcttttcaaaagccctgtgagcataatgagcagaatatagctttaagaactaagattcaccccatcaggcattaatggtgtccagaaactatgtgaacaatcttacttgacatccccaagacatttatatctgtccaatgcaaaatcagaggggggaacatgttaattttctcagccttttgatagcatatatacaagatctcttagccccacaaaagctccagatatattctctaggacttcgactgccttaaaatatagacttgcatttatcttggccacattaacgagatctgtttgaccaatacatttatatttatgatgactgagggcagattatggttgttaaaatttgtccttgggacatgaaaacactcttctgtcattaatacattttataatataaactatgatgtcaggtcaacataaagggtaaaaacgttcctaaagtatgcacacatcattttttaaagcaattgagcctaatggaataacaaaggtcatcataacaaaccattacagccttggtcttggcaactctggccacagaagaacctccaagaaacgatcatcattcctccaatgttatggcatccagacgacaggaatggctcgcaaatgagtcatacgggctcagatccgcggtagctatgtgagcgctggacgatcaattattcatgtgtttacaaagagctttcccggttgatgttaaccagagctgcctgcaacgaagagctctccagctgtcctcggccgtcctgggcctcggactaacaagcggctttaattgctgggcaggtcatgtggaaggtgctcctcccttcaacccagtaaattcaatctctctgagactttgttaggtgtaaaaatgttaatcagaaataattataacaacaatagtttatttacagtactcccagtaaattctaaagagggagacaaaagttagacttaacttagttcccacagggatccaccaggattggagactgaccaataccaggtcagggattggtagagggcataacaaatgccagggaaggggagggactaggggttgtgggtttcacaaggaaggtaagaggaagagcagtctaggatgctctgtaaaggtaaaggagcatgactgaggaccagcaagggtgaatgcactagactggccaacaaataaccaaatgtgagtgaatttgacctgcctatcaaaaatggccttggaagaggctgaatgggaagtcacttctcagtcctttttgttactttacacaacctacagcctgtccaggaagaataataatgtaattaaggcaactcttctctctgagccaggccacagagcatgggagcaggtgccccaccacccaattcctcagctgtgtttggaggaagagcagagttatagtcagagctgtggcccaagcctcttcctgtgaagagagtgtggtcagagcagaccaagggatgcctcagggacttttttactatcccaattccaagaacatctgtggtaccgagccagattcttcctcttgcttgaaattgggtaactttagatatcatcataactcattcatccattcagagaaagtggttgaagcaaacaatctctgttcttgcagacagcaaagcacagtagtgctttgtgcagacatagatagagtcagggccataggacttctgaggtaattctgctttgtagggtggaaggcaacactagttgagaggacttgcaacagaaaggaaaagctagggccgggcgtggtggctcacaactgtaatcccagcactttgggaggccgaggcgggcagatcacgagatcaagagttcgagaccatcctgaacaacatggtgaaaccccgtctctactaaaaatacaaaaattagctgggtgtggtggtgtgcacctgtagtcccagtgagaggtgaagccagctggacttcctgggtctagtggggacttggagaacttttctttctagctagaggattataaatgcaccagtcagtgttctgtgtctagctaaaggattgtaaatgcaccaatcagcactgtaaaaactcaccaatcggcactctgtgtctagctaaaggattgtaaatgcaccaatcagcactctgtaaaatggaccaatcagcactctgtaaaatggagcaatcagcaggacatgggcagggacaaataagggaataaaaggtggccaccccagccagcagcagcagcccatttgggtccccttccgaagctttgttctttcgctctccacaataaatcttgctactgctcactttgggtccgtgccacctttaagagctgtaacactcactgcgaaggtctgtggcttcattcttgaagtcagcgagaccaagaacccaccagaaggaaccaactccagacacaccagctactcgggaggctgaggcagaagaattgcttgaacctgggaggcagaggctgcagtgagctgagatctcaccactgcactccagcctggcaacagagtgagacactgtctcaaaaaaaagaagaaaaaaaaaaaagaaaggagaagctagcagaagagaaacagggcacccctccctggtgcatgaagcatcctggagcactttcatcacaggtggttttgtaacttacatcacaggtattgctgtaagggcaaggttagagagagtttggtttcccttccctcaccctgatccaccctatccatccaaaaatgcatgtttggaaaatgatcccgaagaaagagagtgcttctccctaaggcccacaacaggagagctggtctaagacacttctccacacctcctttaacctatcaagtcccagttccatccttttactccagcaagaggggcaagggagaggacaaggggaagtgtcccaagataggtctccttcacttggcgggaacttttaacttcttcagtcttcccatgagtgcacccctcctgctaactgggattccttggctcactggcattctgcctagagatcagaggatcatttctcaaaagacagtcaaaaacagacctttgggaagggcagcattaaacacagatgtcttcatgaaggcctctccagagccttttgcctttgaagagaagtgaggcacgcaggactttccaaacttactggtccatggaattgtttttagaagcatcccgaaaggcaaactttcagaattccatggaccaataaaacacgggaaatgcagtgttagggtgtggtagcaacactccgattatacccacaatcaaggtctggtctgagagccactctgtcattttcaaggaactttaatgtatctgttctccaccatcatgggttgctttaatttgatacactcttggaatgctgggagcacttgcctggaatttcagcctgccatcactgttggtgacagcctcataaatggtttcccgaagtcccatttggctagtctaatttacccaacctccccatgcactcttaccaaactggcagaccctcacaagctcatctcctcaccatgccccgttatcagtaaagggagaaggagaggaggagtatttctccctataggacaacggcctgaattccaacagcctccccttccccaatttctttctgccttcgtgtgtataagttgctgccctcgtctttcggttggaagtttctaacattttctgcaggagagtcacaaaagcaagcctttaggcagcccctccggagcctggcccacattgtccttttcaagacctccagctctgagtttgtgactccccactgtggctgcagcataagttgccacacagaggagatgcccaccgagggtggatattttggcctgatctcaaacatctgtcatttgctgttgtaagatctgaaagtctgggatggcctacattcctgattctatatttcaagtggaatagtgtgcaaatgctcagtatccaaaataaatgggatatcagctttgtctctggcattaaccaactcattaaatataaaataaacacaagtaaatggcctttaaatctcactgacagaaagcttggcaactactctgagattctagaggtcactggaacttctctcttcaaacaggaatcttcctcacactgtgaggcacagaaggacaggtctgcccagtgaggagggtttctgggtgctcccttccacgtgggtgctgccctgcagagctagctaccccgagagcctgtccatggagaatgatggttactgcccggacggggcacagagaagtggctgttagttcttacaagtggttagaaattcaggactaaggctttcacttgccactaattataaatacctaggaagagccaccaaaccttgggtttctgattgctccctacctattggctattcccagagagcccatattcacatggtttcctaaatcctgtgtacactcactctcccacgggtcccccggtcccattagtaatgctacttgctgaacacttcgctttgtctcaatctatctgtagtttcaacatcaactggacttgttggggaaggtgatggcccaggttctctggaaaattgatgtaattattcacctcatgccaagcatgcagaaaacaaactgtaataattcaccaaccataaaacaagcacatgcacctctttgctcagaactttacttcagggctcagctagatttcagcgattactgacctcttttataaaatcaaagtgaaaaatgtgcagcttttggtaaaaagcatgttgacttgatagtccttcaaacatgggtgcttgcctgggaggctgtgggtgaggaggtccattatgcagaagacccagctgtggtcaggtgtcagaattactggctttgcccattcacctcagtcagctttctttttttttcctgtttcttttttagagatagggtctcactctatcactcaggctggagtgtagtggtgcaatcataactcactgcagcctcaatctcccgctcctgggctcaaccaatccttctacctcatcctcccgagtagccatagccaggactgcaggcacacaccaccacaccgagtgcattttaaaaacattttgtagcgacaggatcccattatattttctgggctggtctcaaactcctgggctcaagccattctcccaccttggcctcccaaagtgctggaattacaggcatgagcccctgtgcccagcctcagtcagctttcacagtctaactttgtgccaagaagttagtaagatctgaaactagtcaaagtagcttccatttattcacagttttaaaaacatttttcaagtttagtcaacttcccaatataatcaaaggacaaaatggcaataaaaaatatacttcatcagatcttagagttatacaatcagttaaaaaatagatattgggttttaaacaactgacatatgctttccttttccccctttaaaggttttcagtagtctatctgaaatcactgaatcacttttcttctcctccacagaattcagaactttttcacccggaactggagaaggagcactccgtcattagctgaggggaatggcaaggatccaggggtcctccatgactacacaaccatcctcctgagcacctttaggaaatccaatgctgtctgagaagcagcagggccagatccagatctatggaaaattaatatctgcagtgcttcctgaaggtcacctcagtctttatgccatttcaaaagctagcccggggcttgagaagaaaagggaagtggcattccagccatatttggggtgcaatttaattttcattgcgtacctcatgaacaggggcaataacacattctaggatattcttccagcccacccactcttcctctttctcttcttctctttctctaacgagtggtagtgacaggatgcaagtctgcgctcttggtagataaacggagaagcaggagaaagaactattccataatcagttaaacggggagttttcagaatcctgtcttgtcatttaagtgacttactgaagtcctactaagttattgagactatatttctttactttttgcactgggacattgaagcattgagacaccagaagtccaaaagacgaaaaatgtgaaaatcacaaatttaaagaaaatgtagaggtctcagttctgaaacaccatgcttcaagtgttgtcatttttgagaacatttttaaaaggcatctaatattccaggacatacggttcccattactggcccagcaggtacacagggtctcccactttgatggtccctgggttttccagcacaaaatactgcccaaagagtggtgattttccatataactttcgttctgaagggtcacactggcgataactcttcagtgtttccagcggttccttcctgctcatgacaccggtgtctgggtccactgtggttaaaatgcatctggaacaagccatcacccttttcagttccacgtcaccaataagaagctcatcccaagaatcctctgcatagacatcgcatcctgaaattacaatattgggcctgaagttggttgctttaactttcttctctagcctggagttgagatccgccagcgacgcctcagaaaggatcaagaatgggctggtgtctgagtaagcaatctggtccttgggtcggaacaagtctgctatttgatgaggacgtctcggtcgcatgtgaggctcgaagtgcaccaggcggtagggctgtgacttcaggaagctggttatccactgggcggtggcctcgccacagtccctgccctctatctccaggccgtgcactctgcacttgtgcactgcatttgtggtgggcgttttgataggcagtagtaggtcctttgtgtaggctgcactgagagtcagggtgtcaccatcgcaggtcagggaaatcaggaccaggcgaggttcctggcgagcagtaaccatgtttccctcctggttgatcacaagccaaaacctgtcccgcaggttgccgctgcgcagccccatggccgtgcactccgcctcgctcaccggcacccccttgcaggatttcacagggtagatccagagctgcgccactgtgcccacctgctgcagcagccgccggcgccgcgtgggccatgcgcggcgccaggcgacagcccccagcgccaccgcggtcaggcccagcgcggcaaccccgagccacccgggccgggattgcgcgaggaggacaaagcgcgccagcgcggaggagccggcggcgcccatggctggcttctccgcgaggtggcggcggcaag

SEQ ID NO: 4002 - skipped

SEQ ID NO: 4003 - DNA, 2670 bp, Homo sapiens
ttctctgttgatggacactcgggctgttactactttttcagcattttgattaaagctgcaataaacattgatacacaaatgtctgtttgagttcctgttttcagttctttggggtctatacgtaggagtgtgctaggtattttatgttttatatatattttactgcaattaaaaaataaatatataaaagactggcctgtgtgaagacctcgggaggtaagaatggctggagcaacagctggatcatgaagggctgggcacgcccttgtttaggagttggttttatcctgaaagcaggaaccatggagggattttgaatgagggggtcataaagttagatttgcattttagagcgatgtaaactgccattaccaggaagaatattagacagaatattcacctgctagtcccaaggatttgggtcagggcaggcctctgtctgtgcagaaacaaagtctggtaaaagggcagttacggaaagggcttatactaagcatatttttctagtgtagctgaacaactcaaccatgataacctgctggaagtgatgcaagaaatatcttgaacgacctaaagtaccggccatatttttttcttatgtctggaaatctcaaaagcacatgctcacttctataattgtaatcatttgatcagtgtgtactgtaaggattgaaatgccaatatgttttgcttccttggtagctgagagataacctgcaaaaacatgttgttcttgttctggaaatggctctttctattacctttatttctccatttatctttttttctaggaagtacctgtagaccaggaatactgggccagaagaaaaaaatactgtctagtttagcaaattgcagaatggacagcactgaatgttggaacataaaatttttaaaaggttttggcttgtgatcaaccaggagggaaacatggttactgctcgccaggaacctcgcctggtcctgatttccctgacctgcgatggtgacaccctgactctcagtgcagcctacacaaaggacctactactgcctatcaaaacgcccaccacaaatgcagtgcacaagtgcagagtgcacggcctggagatagagggcagggactgtggcgaggccaccgcccagtggataaccagcttcctgaagtcacagccctaccgcctggtgcacttcgagcctcacatgcgaccgagacgtcctcatcaaatagcagacttgttccgacccaaggaccagattgcttactcagacaccagcccattcttgatcctttctgaggcgtcgctggcggatctcaactccaggctagagaagaaagttaaagcaaccaacttcaggcccaatattgtaatttcaggatgcgatgtctatgcagaggtaacactatgcccctttggatctttccttggatttgacttcttttttaaggattcttgggatgagcttcttattggtgacgtggaactgaaaagggtgatggcttgttccagatgcattttaaccacagtggacccagacaccggtgtcatgagcaggaaggaaccgctggaaacactgaagagttatcgccagtgtgacccttcagaacgaaagttatatggaaaatcaccactctttgggcagtattttgtgctggaaaacccagggaccatcaaagtgggagaccctgtgtacctgctgggccagtaatgggaaccgtatgtcctggaatattagatgccttttaaaaatgttctcaaaaatgacaacacttgaagcatggtgtttcagaactgagacctctacattttctttaaatttgtgattttcacatttttcgtcttttggacttctggtgtctcaatgcttcaatgtcccagtgcaaaaagtaaagaaatatagtctcaataacttagtaggacttcagtaagtcacttaaatgacaagacaggattctgaaaactccccgtttaactgattatggaatagttctttctcctgcttctccgtttatctaccaagagcgcagacttgcatcctgtcactaccactcgttagagaaagagaagaagagaaagaggaagagtgggtgggctggaagaatatcctagaatgtgttattgcccctgttcatgaggtacgcaatgaaaattaaattgcaccccaaatatggctggaatgccacttcccttttcttctcaagccccgggctagcttttgaaatggcataaagactgaggtgaccttcaggaagcactgcagatattaattttccatagatctggatctggccctgctgcttctcagacagcattggatttcctaaaggtgctcaggaggatggttgtgtagtcatggaggacccctggatccttgccattcccctcagctaatgacggagtgctccttctccagttccgggtgaaaaagttctgaattctgtggaggagaagaaaagtgattcagtgatttcagatagactactgaaaacctttaaagggggaaaaggaaagcatatgtcagttgtttaaaacccaatatctattttttaactgattgtataactctaagatctgatgaagtatattttttattgccattttgtcctttgattatattgggaagttgactaaacttgaaaaatgtttttaaaactgtgaataaatggaagctactttgactagtttcaga

SEQ ID NO: 4004 - DNA, 2670 bp, Homo sapiens
tctgaaactagtcaaagtagcttccatttattcacagttttaaaaacatttttcaagtttagtcaacttcccaatataatcaaaggacaaaatggcaataaaaaatatacttcatcagatcttagagttatacaatcagttaaaaaatagatattgggttttaaacaactgacatatgctttccttttccccctttaaaggttttcagtagtctatctgaaatcactgaatcacttttcttctcctccacagaattcagaactttttcacccggaactggagaaggagcactccgtcattagctgaggggaatggcaaggatccaggggtcctccatgactacacaaccatcctcctgagcacctttaggaaatccaatgctgtctgagaagcagcagggccagatccagatctatggaaaattaatatctgcagtgcttcctgaaggtcacctcagtctttatgccatttcaaaagctagcccggggcttgagaagaaaagggaagtggcattccagccatatttggggtgcaatttaattttcattgcgtacctcatgaacaggggcaataacacattctaggatattcttccagcccacccactcttcctctttctcttcttctctttctctaacgagtggtagtgacaggatgcaagtctgcgctcttggtagataaacggagaagcaggagaaagaactattccataatcagttaaacggggagttttcagaatcctgtcttgtcatttaagtgacttactgaagtcctactaagttattgagactatatttctttactttttgcactgggacattgaagcattgagacaccagaagtccaaaagacgaaaaatgtgaaaatcacaaatttaaagaaaatgtagaggtctcagttctgaaacaccatgcttcaagtgttgtcatttttgagaacatttttaaaaggcatctaatattccaggacatacggttcccattactggcccagcaggtacacagggtctcccactttgatggtccctgggttttccagcacaaaatactgcccaaagagtggtgattttccatataactttcgttctgaagggtcacactggcgataactcttcagtgtttccagcggttccttcctgctcatgacaccggtgtctgggtccactgtggttaaaatgcatctggaacaagccatcacccttttcagttccacgtcaccaataagaagctcatcccaagaatccttaaaaaagaagtcaaatccaaggaaagatccaaaggggcatagtgttacctctgcatagacatcgcatcctgaaattacaatattgggcctgaagttggttgctttaactttcttctctagcctggagttgagatccgccagcgacgcctcagaaaggatcaagaatgggctggtgtctgagtaagcaatctggtccttgggtcggaacaagtctgctatttgatgaggacgtctcggtcgcatgtgaggctcgaagtgcaccaggcggtagggctgtgacttcaggaagctggttatccactgggcggtggcctcgccacagtccctgccctctatctccaggccgtgcactctgcacttgtgcactgcatttgtggtgggcgttttgataggcagtagtaggtcctttgtgtaggctgcactgagagtcagggtgtcaccatcgcaggtcagggaaatcaggaccaggcgaggttcctggcgagcagtaaccatgtttccctcctggttgatcacaagccaaaaccttttaaaaattttatgttccaacattcagtgctgtccattctgcaatttgctaaactagacagtatttttttcttctggcccagtattcctggtctacaggtacttcctagaaaaaaagataaatggagaaataaaggtaatagaaagagccatttccagaacaagaacaacatgtttttgcaggttatctctcagctaccaaggaagcaaaacatattggcatttcaatccttacagtacacactgatcaaatgattacaattatagaagtgagcatgtgcttttgagatttccagacataagaaaaaaatatggccggtactttaggtcgttcaagatatttcttgcatcacttccagcaggttatcatggttgagttgttcagctacactagaaaaatatgcttagtataagccctttccgtaactgcccttttaccagactttgtttctgcacagacagaggcctgccctgacccaaatccttgggactagcaggtgaatattctgtctaatattcttcctggtaatggcagtttacatcgctctaaaatgcaaatctaactttatgaccccctcattcaaaatccctccatggttcctgctttcaggataaaaccaactcctaaacaagggcgtgcccagcccttcatgatccagctgttgctccagccattcttacctcccgaggtcttcacacaggccagtcttttatatatttattttttaattgcagtaaaatatatataaaacataaaatacctagcacactcctacgtatagaccccaaagaactgaaaacaggaactcaaacagacatttgtgtatcaatgtttattgcagctttaatcaaaatgctgaaaaagtagtaacagcccgagtgtccatcaacagagaa

SEQ ID NO: 4005 - DNA, 1947 bp, Homo sapiens
ttgtcctctttagggtctggcttcaggccagcctcgggtcttattgtgaggctgcacttgaaactcctttccagagcagccctcgcagttcagcaagtaacacaggactaatgggagctgtaacctttctcctaccagctccccagacagagggcaattcatgacatagttgaaaggttttggcttgtgatcaaccaggagggaaacatggttactgctcgccaggaacctcgcctggtcctgatttccctgacctgcgatggtgacaccctgactctcagtgcagcctacacaaaggacctactactgcctatcaaaacgcccaccacaaatgcagtgcacaagtgcagagtgcacggcctggagatagagggcagggactgtggcgaggccaccgcccagtggataaccagcttcctgaagtcacagccctaccgcctggtgcacttcgagcctcacatgcgaccgagacgtcctcatcaaatagcagacttgttccgacccaaggaccagattgcttactcagacaccagcccattcttgatcctttctgaggcgtcgctggcggatctcaactccaggctagagaagaaagttaaagcaaccaacttcaggcccaatattgtaatttcaggatgcgatgtctatgcagaggtaacactatgcccctttggatctttccttggatttgacttcttttttaaggattcttgggatgagcttcttattggtgacgtggaactgaaaagggtgatggcttgttccagatgcattttaaccacagtggacccagacaccggtgtcatgagcaggaaggaaccgctggaaacactgaagagttatcgccagtgtgacccttcagaacgaaagttatatggaaaatcaccactctttgggcagtattttgtgctggaaaacccagggaccatcaaagtgggagaccctgtgtacctgctgggccagtaatgggaaccgtatgtcctggaatattagatgccttttaaaaatgttctcaaaaatgacaacacttgaagcatggtgtttcagaactgagacctctacattttctttaaatttgtgattttcacatttttcgtcttttggacttctggtgtctcaatgcttcaatgtcccagtgcaaaaagtaaagaaatatagtctcaataacttagtaggacttcagtaagtcacttaaatgacaagacaggattctgaaaactccccgtttaactgattatggaatagttctttctcctgcttctccgtttatctaccaagagcgcagacttgcatcctgtcactaccactcgttagagaaagagaagaagagaaagaggaagagtgggtgggctggaagaatatcctagaatgtgttattgcccctgttcatgaggtacgcaatgaaaattaaattgcaccccaaatatggctggaatgccacttcccttttcttctcaagccccgggctagcttttgaaatggcataaagactgaggtgaccttcaggaagcactgcagatattaattttccatagatctggatctggccctgctgcttctcagacagcattggatttcctaaaggtgctcaggaggatggttgtgtagtcatggaggacccctggatccttgccattcccctcagctaatgacggagtgctccttctccagttccgggtgaaaaagttctgaattctgtggaggagaagaaaagtgattcagtgatttcagatagactactgaaaacctttaaagggggaaaaggaaagcatatgtcagttgtttaaaacccaatatctattttttaactgattgtataactctaagatctgatgaagtatattttttattgccattttgtcctttgattatattgggaagttgactaaacttgaaaaatgtttttaaaactgtgaataaatggaagctactttgactagtttcaga

SEQ ID NO: 4006 - DNA, 1947 bp, Homo sapiens
tctgaaactagtcaaagtagcttccatttattcacagttttaaaaacatttttcaagtttagtcaacttcccaatataatcaaaggacaaaatggcaataaaaaatatacttcatcagatcttagagttatacaatcagttaaaaaatagatattgggttttaaacaactgacatatgctttccttttccccctttaaaggttttcagtagtctatctgaaatcactgaatcacttttcttctcctccacagaattcagaactttttcacccggaactggagaaggagcactccgtcattagctgaggggaatggcaaggatccaggggtcctccatgactacacaaccatcctcctgagcacctttaggaaatccaatgctgtctgagaagcagcagggccagatccagatctatggaaaattaatatctgcagtgcttcctgaaggtcacctcagtctttatgccatttcaaaagctagcccggggcttgagaagaaaagggaagtggcattccagccatatttggggtgcaatttaattttcattgcgtacctcatgaacaggggcaataacacattctaggatattcttccagcccacccactcttcctctttctcttcttctctttctctaacgagtggtagtgacaggatgcaagtctgcgctcttggtagataaacggagaagcaggagaaagaactattccataatcagttaaacggggagttttcagaatcctgtcttgtcatttaagtgacttactgaagtcctactaagttattgagactatatttctttactttttgcactgggacattgaagcattgagacaccagaagtccaaaagacgaaaaatgtgaaaatcacaaatttaaagaaaatgtagaggtctcagttctgaaacaccatgcttcaagtgttgtcatttttgagaacatttttaaaaggcatctaatattccaggacatacggttcccattactggcccagcaggtacacagggtctcccactttgatggtccctgggttttccagcacaaaatactgcccaaagagtggtgattttccatataactttcgttctgaagggtcacactggcgataactcttcagtgtttccagcggttccttcctgctcatgacaccggtgtctgggtccactgtggttaaaatgcatctggaacaagccatcacccttttcagttccacgtcaccaataagaagctcatcccaagaatccttaaaaaagaagtcaaatccaaggaaagatccaaaggggcatagtgttacctctgcatagacatcgcatcctgaaattacaatattgggcctgaagttggttgctttaactttcttctctagcctggagttgagatccgccagcgacgcctcagaaaggatcaagaatgggctggtgtctgagtaagcaatctggtccttgggtcggaacaagtctgctatttgatgaggacgtctcggtcgcatgtgaggctcgaagtgcaccaggcggtagggctgtgacttcaggaagctggttatccactgggcggtggcctcgccacagtccctgccctctatctccaggccgtgcactctgcacttgtgcactgcatttgtggtgggcgttttgataggcagtagtaggtcctttgtgtaggctgcactgagagtcagggtgtcaccatcgcaggtcagggaaatcaggaccaggcgaggttcctggcgagcagtaaccatgtttccctcctggttgatcacaagccaaaacctttcaactatgtcatgaattgccctctgtctggggagctggtaggagaaaggttacagctcccattagtcctgtgttacttgctgaactgcgagggctgctctggaaaggagtttcaagtgcagcctcacaataagacccgaggctggcctgaagccagaccctaaagaggacaa

SEQ ID NO: 4007 - DNA, 1823 bp, Homo sapiens
acctgtagaccaggaatactgggccagaagaaaaaaatactgtctagtttagcaaattgcagaatggacagcactgaatgttggaacataaaatttttaaaaggttttggcttgtgatcaaccaggagggaaacatggttactgctcgccaggaacctcgcctggtcctgatttccctgacctgcgatggtgacaccctgactctcagtgcagcctacacaaaggacctactactgcctatcaaaacgcccaccacaaatgcagtgcacaagtgcagagtgcacggcctggagatagagggcagggactgtggcgaggccaccgcccagtggataaccagcttcctgaagtcacagccctaccgcctggtgcacttcgagcctcacatgcgaccgagacgtcctcatcaaatagcagacttgttccgacccaaggaccagattgcttactcagacaccagcccattcttgatcctttctgaggcgtcgctggcggatctcaactccaggctagagaagaaagttaaagcaaccaacttcaggcccaatattgtaatttcaggatgcgatgtctatgcagaggattcttgggatgagcttcttattggtgacgtggaactgaaaagggtgatggcttgttccagatgcattttaaccacagtggacccagacaccggtgtcatgagcaggaaggaaccgctggaaacactgaagagttatcgccagtgtgacccttcagaacgaaagttatatggaaaatcaccactctttgggcagtattttgtgctggaaaacccagggaccatcaaagtgggagaccctgtgtacctgctgggccagtaatgggaaccgtatgtcctggaatattagatgccttttaaaaatgttctcaaaaatgacaacacttgaagcatggtgtttcagaactgagacctctacattttctttaaatttgtgattttcacatttttcgtcttttggacttctggtgtctcaatgcttcaatgtcccagtgcaaaaagtaaagaaatatagtctcaataacttagtaggacttcagtaagtcacttaaatgacaagacaggattctgaaaactccccgtttaactgattatggaatagttctttctcctgcttctccgtttatctaccaagagcgcagacttgcatcctgtcactaccactcgttagagaaagagaagaagagaaagaggaagagtgggtgggctggaagaatatcctagaatgtgttattgcccctgttcatgaggtacgcaatgaaaattaaattgcaccccaaatatggctggaatgccacttcccttttcttctcaagccccgggctagcttttgaaatggcataaagactgaggtgaccttcaggaagcactgcagatattaattttccatagatctggatctggccctgctgcttctcagacagcattggatttcctaaaggtgctcaggaggatggttgtgtagtcatggaggacccctggatccttgccattcccctcagctaatgacggagtgctccttctccagttccgggtgaaaaagttctgaattctgtggaggagaagaaaagtgattcagtgatttcagatagactactgaaaacctttaaagggggaaaaggaaagcatatgtcagttgtttaaaacccaatatctattttttaactgattgtataactctaagatctgatgaagtatattttttattgccattttgtcctttgattatattgggaagttgactaaacttgaaaaatgtttttaaaactgtgaataaatggaagctactttgactagtttcaga

SEQ ID NO: 4008 - DNA, 1823 bp, Homo sapiens
tctgaaactagtcaaagtagcttccatttattcacagttttaaaaacatttttcaagtttagtcaacttcccaatataatcaaaggacaaaatggcaataaaaaatatacttcatcagatcttagagttatacaatcagttaaaaaatagatattgggttttaaacaactgacatatgctttccttttccccctttaaaggttttcagtagtctatctgaaatcactgaatcacttttcttctcctccacagaattcagaactttttcacccggaactggagaaggagcactccgtcattagctgaggggaatggcaaggatccaggggtcctccatgactacacaaccatcctcctgagcacctttaggaaatccaatgctgtctgagaagcagcagggccagatccagatctatggaaaattaatatctgcagtgcttcctgaaggtcacctcagtctttatgccatttcaaaagctagcccggggcttgagaagaaaagggaagtggcattccagccatatttggggtgcaatttaattttcattgcgtacctcatgaacaggggcaataacacattctaggatattcttccagcccacccactcttcctctttctcttcttctctttctctaacgagtggtagtgacaggatgcaagtctgcgctcttggtagataaacggagaagcaggagaaagaactattccataatcagttaaacggggagttttcagaatcctgtcttgtcatttaagtgacttactgaagtcctactaagttattgagactatatttctttactttttgcactgggacattgaagcattgagacaccagaagtccaaaagacgaaaaatgtgaaaatcacaaatttaaagaaaatgtagaggtctcagttctgaaacaccatgcttcaagtgttgtcatttttgagaacatttttaaaaggcatctaatattccaggacatacggttcccattactggcccagcaggtacacagggtctcccactttgatggtccctgggttttccagcacaaaatactgcccaaagagtggtgattttccatataactttcgttctgaagggtcacactggcgataactcttcagtgtttccagcggttccttcctgctcatgacaccggtgtctgggtccactgtggttaaaatgcatctggaacaagccatcacccttttcagttccacgtcaccaataagaagctcatcccaagaatcctctgcatagacatcgcatcctgaaattacaatattgggcctgaagttggttgctttaactttcttctctagcctggagttgagatccgccagcgacgcctcagaaaggatcaagaatgggctggtgtctgagtaagcaatctggtccttgggtcggaacaagtctgctatttgatgaggacgtctcggtcgcatgtgaggctcgaagtgcaccaggcggtagggctgtgacttcaggaagctggttatccactgggcggtggcctcgccacagtccctgccctctatctccaggccgtgcactctgcacttgtgcactgcatttgtggtgggcgttttgataggcagtagtaggtcctttgtgtaggctgcactgagagtcagggtgtcaccatcgcaggtcagggaaatcaggaccaggcgaggttcctggcgagcagtaaccatgtttccctcctggttgatcacaagccaaaaccttttaaaaattttatgttccaacattcagtgctgtccattctgcaatttgctaaactagacagtatttttttcttctggcccagtattcctggtctacaggt

SEQ ID NO: 4009 - DNA, 1876 bp, Homo sapiens
cttcaggccagcctcgggtcttattgtgaggctgcacttgaaactcctttccagagcagccctcgcagttcagcaagtaacacaggactaatgggagctgtaacctttctcctaccagctccccagacagagggcaattcatgacatagttgaaaggttttggcttgtgatcaaccaggagggaaacatggttactgctcgccaggaacctcgcctggtcctgatttccctgacctgcgatggtgacaccctgactctcagtgcagcctacacaaaggacctactactgcctatcaaaacgcccaccacaaatgcagtgcacaagtgcagagtgcacggcctggagatagagggcagggactgtggcgaggccaccgcccagtggataaccagcttcctgaagtcacagccctaccgcctggtgcacttcgagcctcacatgcgaccgagacgtcctcatcaaatagcagacttgttccgacccaaggaccagattgcttactcagacaccagcccattcttgatcctttctgaggcgtcgctggcggatctcaactccaggctagagaagaaagttaaagcaaccaacttcaggcccaatattgtaatttcaggatgcgatgtctatgcagaggattcttgggatgagcttcttattggtgacgtggaactgaaaagggtgatggcttgttccagatgcattttaaccacagtggacccagacaccggtgtcatgagcaggaaggaaccgctggaaacactgaagagttatcgccagtgtgacccttcagaacgaaagttatatggaaaatcaccactctttgggcagtattttgtgctggaaaacccagggaccatcaaagtgggagaccctgtgtacctgctgggccagtaatgggaaccgtatgtcctggaatattagatgccttttaaaaatgttctcaaaaatgacaacacttgaagcatggtgtttcagaactgagacctctacattttctttaaatttgtgattttcacatttttcgtcttttggacttctggtgtctcaatgcttcaatgtcccagtgcaaaaagtaaagaaatatagtctcaataacttagtaggacttcagtaagtcacttaaatgacaagacaggattctgaaaactccccgtttaactgattatggaatagttctttctcctgcttctccgtttatctaccaagagcgcagacttgcatcctgtcactaccactcgttagagaaagagaagaagagaaagaggaagagtgggtgggctggaagaatatcctagaatgtgttattgcccctgttcatgaggtacgcaatgaaaattaaattgcaccccaaatatggctggaatgccacttcccttttcttctcaagccccgggctagcttttgaaatggcataaagactgaggtgaccttcaggaagcactgcagatattaattttccatagatctggatctggccctgctgcttctcagacagcattggatttcctaaaggtgctcaggaggatggttgtgtagtcatggaggacccctggatccttgccattcccctcagctaatgacggagtgctccttctccagttccgggtgaaaaagttctgaattctgtggaggagaagaaaagtgattcagtgatttcagatagactactgaaaacctttaaagggggaaaaggaaagcatatgtcagttgtttaaaacccaatatctattttttaactgattgtataactctaagatctgatgaagtatattttttattgccattttgtcctttgattatattgggaagttgactaaacttgaaaaatgtttttaaaactgtgaataaatggaagctactttgactagtttcaga

SEQ ID NO: 4010 - DNA, 1876 bp, Homo sapiens
tctgaaactagtcaaagtagcttccatttattcacagttttaaaaacatttttcaagtttagtcaacttcccaatataatcaaaggacaaaatggcaataaaaaatatacttcatcagatcttagagttatacaatcagttaaaaaatagatattgggttttaaacaactgacatatgctttccttttccccctttaaaggttttcagtagtctatctgaaatcactgaatcacttttcttctcctccacagaattcagaactttttcacccggaactggagaaggagcactccgtcattagctgaggggaatggcaaggatccaggggtcctccatgactacacaaccatcctcctgagcacctttaggaaatccaatgctgtctgagaagcagcagggccagatccagatctatggaaaattaatatctgcagtgcttcctgaaggtcacctcagtctttatgccatttcaaaagctagcccggggcttgagaagaaaagggaagtggcattccagccatatttggggtgcaatttaattttcattgcgtacctcatgaacaggggcaataacacattctaggatattcttccagcccacccactcttcctctttctcttcttctctttctctaacgagtggtagtgacaggatgcaagtctgcgctcttggtagataaacggagaagcaggagaaagaactattccataatcagttaaacggggagttttcagaatcctgtcttgtcatttaagtgacttactgaagtcctactaagttattgagactatatttctttactttttgcactgggacattgaagcattgagacaccagaagtccaaaagacgaaaaatgtgaaaatcacaaatttaaagaaaatgtagaggtctcagttctgaaacaccatgcttcaagtgttgtcatttttgagaacatttttaaaaggcatctaatattccaggacatacggttcccattactggcccagcaggtacacagggtctcccactttgatggtccctgggttttccagcacaaaatactgcccaaagagtggtgattttccatataactttcgttctgaagggtcacactggcgataactcttcagtgtttccagcggttccttcctgctcatgacaccggtgtctgggtccactgtggttaaaatgcatctggaacaagccatcacccttttcagttccacgtcaccaataagaagctcatcccaagaatcctctgcatagacatcgcatcctgaaattacaatattgggcctgaagttggttgctttaactttcttctctagcctggagttgagatccgccagcgacgcctcagaaaggatcaagaatgggctggtgtctgagtaagcaatctggtccttgggtcggaacaagtctgctatttgatgaggacgtctcggtcgcatgtgaggctcgaagtgcaccaggcggtagggctgtgacttcaggaagctggttatccactgggcggtggcctcgccacagtccctgccctctatctccaggccgtgcactctgcacttgtgcactgcatttgtggtgggcgttttgataggcagtagtaggtcctttgtgtaggctgcactgagagtcagggtgtcaccatcgcaggtcagggaaatcaggaccaggcgaggttcctggcgagcagtaaccatgtttccctcctggttgatcacaagccaaaacctttcaactatgtcatgaattgccctctgtctggggagctggtaggagaaaggttacagctcccattagtcctgtgttacttgctgaactgcgagggctgctctggaaaggagtttcaagtgcagcctcacaataagacccgaggctggcctgaag

SEQ ID NO: 4011 - DNA, 2148 bp, Mus musculus
agctgagccaccacctcccgcccaggccgaatgaagatgcacaatttggattggaggggaagggtcaggagctgctgacctttgggctcaggcccaggccgctggccacagtagctcttggtccagtcggcgccggaggtgtatcaagcgctcatcccgccctctccagtcatgggtgcggggtcctgggcgctgaccctcttcggcttctccgcgtttcgggtcccgggccagccgcggtccacctggctcggcgtcgccgcgctgggactggccgcggtggccctggggacagtggcctggcgtcgtgcgcgtccccggcgacgccggcggctacagcaagtgggaacggtggcacagctctggatctacccaatcaagtcctgcaaggggttgtcggtgagcgaggcagagtgcactgccatggggctgcgctatggccacctgcgcgacaggttttggctcgtgatcaatgaagaggggaacatggtcactgcccggcaggagcctcgattggtcctgatttctctgacctgtgaggacgacaccttgactctcagtgcagcttacacaaaggacctgctgctgcctatcaccccgcctgccacaaacccactcctccagtgcagagtgcatggcctggagatacagggcagggattgtggagaggatgcagctcagtgggtcagcagcttcttgaagatgcagtcctgtcgcctggtgcacttcgagccgcacatgcgccccagaagttctcggcaaatgaaggctgtgttccggaccaaggaccaggtggcctactcagatgcaagtccattcttggtcctttctgaggcatccttggaagatctcaactccaggctggagcgcagagtgaaagcgacaaacttcaggcctaacattgtcatctcgggatgtggcgtttatgctgaggattcttggaacgaggttctcattggagatgtggaactgaaacgggtgatggcttgtacccggtgccttttaacaacagtggatccagacactggcatctcggacaggaaggagcctctggaaacactgaagagctaccgcctgtgtgacccttccgagcaagcactatatggaaagttacccatctttggacaatacttcgctctggaaaatccagggacaatcagagtgggagaccctgtgtacctcctgggccagtgatgggaactgttcgttctggaagaacagatggctcttaaaaaaaaacttttacaaacagacatcgcttgaaacagttcttcagcctgttctttggatcggccagttccaagtttctcttctttcagatttccgtctgtttcaatgtttcctggggccagcccacaaagcaggcaaatacagctttgcgaacttagcaggtccctgttatgtttcttgtagaatgaagggattatcatattgccctgtttataaatacggagtaatccttctacgtcggaattcacttgccaagacatcatctccctagccttcttttgggaaagagaagaaaaagggagggacactgtgtaagccagaagaatgttccagaatgttctgttacccctggacatggtgcatacaacgggaattaaatactctcccaagtaaagttggaatgacggcttttacttttctccttgagcccaggctttggaaagagtttaaagagcaagccctaaagatattggatgctgttgcttactgacagtgtgaagtttgacagaccctttagcccaagaacacgaagtgtcagggtcaaagccagctctctacagcatccagacgggctctcagctctgtgaaaaaggtgtttccactcttgaagcaaagtgttgatgcgcctcactaaaggattcaagatcgttcctagcatgtggggacagatagtgacaccagagagggagatacctccgcctgggtgtctaagatgagatttgatcttgcccaggaaaatggtggctctcttaatatgagcaaaatgaaatggtggcgccccctagtggtagtgaatggtaggtcggcccaccttgagaaaaatttaaaaaggggaaaaacaaaacaaaacaaaaccaaagcaatcttgtgcttgttgtttagttttaaattttaaaacgttttaaaaactgaaaaaaa

SEQ ID NO: 4012 - DNA, 2148 bp, Mus musculus
tttttttcagtttttaaaacgttttaaaatttaaaactaaacaacaagcacaagattgctttggttttgttttgttttgtttttcccctttttaaatttttctcaaggtgggccgacctaccattcactaccactagggggcgccaccatttcattttgctcatattaagagagccaccattttcctgggcaagatcaaatctcatcttagacacccaggcggaggtatctccctctctggtgtcactatctgtccccacatgctaggaacgatcttgaatcctttagtgaggcgcatcaacactttgcttcaagagtggaaacacctttttcacagagctgagagcccgtctggatgctgtagagagctggctttgaccctgacacttcgtgttcttgggctaaagggtctgtcaaacttcacactgtcagtaagcaacagcatccaatatctttagggcttgctctttaaactctttccaaagcctgggctcaaggagaaaagtaaaagccgtcattccaactttacttgggagagtatttaattcccgttgtatgcaccatgtccaggggtaacagaacattctggaacattcttctggcttacacagtgtccctccctttttcttctctttcccaaaagaaggctagggagatgatgtcttggcaagtgaattccgacgtagaaggattactccgtatttataaacagggcaatatgataatcccttcattctacaagaaacataacagggacctgctaagttcgcaaagctgtatttgcctgctttgtgggctggccccaggaaacattgaaacagacggaaatctgaaagaagagaaacttggaactggccgatccaaagaacaggctgaagaactgtttcaagcgatgtctgtttgtaaaagtttttttttaagagccatctgttcttccagaacgaacagttcccatcactggcccaggaggtacacagggtctcccactctgattgtccctggattttccagagcgaagtattgtccaaagatgggtaactttccatatagtgcttgctcggaagggtcacacaggcggtagctcttcagtgtttccagaggctccttcctgtccgagatgccagtgtctggatccactgttgttaaaaggcaccgggtacaagccatcacccgtttcagttccacatctccaatgagaacctcgttccaagaatcctcagcataaacgccacatcccgagatgacaatgttaggcctgaagtttgtcgctttcactctgcgctccagcctggagttgagatcttccaaggatgcctcagaaaggaccaagaatggacttgcatctgagtaggccacctggtccttggtccggaacacagccttcatttgccgagaacttctggggcgcatgtgcggctcgaagtgcaccaggcgacaggactgcatcttcaagaagctgctgacccactgagctgcatcctctccacaatccctgccctgtatctccaggccatgcactctgcactggaggagtgggtttgtggcaggcggggtgataggcagcagcaggtcctttgtgtaagctgcactgagagtcaaggtgtcgtcctcacaggtcagagaaatcaggaccaatcgaggctcctgccgggcagtgaccatgttcccctcttcattgatcacgagccaaaacctgtcgcgcaggtggccatagcgcagccccatggcagtgcactctgcctcgctcaccgacaaccccttgcaggacttgattgggtagatccagagctgtgccaccgttcccacttgctgtagccgccggcgtcgccggggacgcgcacgacgccaggccactgtccccagggccaccgcggccagtcccagcgcggcgacgccgagccaggtggaccgcggctggcccgggacccgaaacgcggagaagccgaagagggtcagcgcccaggaccccgcacccatgactggagagggcgggatgagcgcttgatacacctccggcgccgactggaccaagagctactgtggccagcggcctgggcctgagcccaaaggtcagcagctcctgacccttcccctccaatccaaattgtgcatcttcattcggcctgggcgggaggtggtggctcagct

SEQ ID NO: 4013 - RNA, 21 nt, Artificial Sequence
  source: /note="Description of Artificial Sequence: Synthetic oligonucleotide"
aacaguguucuugcucuauaa

SEQ ID NO: 4014 - RNA, 23 nt, Artificial Sequence
  source: /note="Description of Artificial Sequence: Synthetic oligonucleotide"
uuauagagcaagaacacuguuuu
